(19) United States
(12) Patent Application Publication
(10) Pub. No.: US 2016/0040240 A1
(43) Pub. Date: Feb. 11, 2016

(54) CACNA1C ALLELE AND TREATMENT OF MOOD DISORDERS

(71) Applicant: THE UNIVERSITY OF CHICAGO, Chicago, IL (US)

(72) Inventors: Elliot Gershon, Chicago, IL (US); Chunyu Liu, Chicago, IL (US); Judith Badner, Chicago, IL (US)

(21) Appl. No.: 14/823,973

(22) Filed: Aug. 11, 2015

Related U.S. Application Data
(60) Provisional application No. 62/035,970, filed on Aug. 11, 2014.

(51) Int. Cl. C12Q 1/68; A61K 31/4439; A61K 31/4418; A61K 31/554; A61K 31/277; A61K 45/06

(52) U.S. Cl. CPC C12Q 1/6883; A61K 31/277; A61K 45/06; A61K 31/4418; A61K 31/554; A61K 31/4439; C12Q 2600/106; C12Q 2600/156

(57) ABSTRACT

Provided herein are methods of determining a treatment regimen for a subject with a mood disorder and methods of identifying a patient with a mood disorder as amenable to treatment with a calcium channel blocker (CCB). In exemplary embodiments, the methods comprise (a) analyzing a sample obtained from a subject with a mood disorder for the presence of allele [A] of CACNA1C, wherein allele [A] comprises the sequence of the polymorphic marker rs1006737.

### GRANT FUNDING

[0001] This invention was made with government support under Grant No. 1R01MH080425 awarded by the National Institutes of Health, and Grant No. 1R01MH094483-01 awarded by the National Institute of Mental Health. The government has certain rights in the invention.

### INCORPORATION BY REFERENCE OF MATERIAL SUBMITTED ELECTRONICALLY

[0002] Incorporated by reference in its entirety is a computer-readable nucleotide/amino acid sequence listing submitted concurrently herewith and identified as follows: 1,810,321 byte ACII (Text) file named “48562A_SeqListing.txt” created on Aug. 11, 2015.

### BACKGROUND

[0003] Bipolar I disorder (BD) is a serious mental illness with life threatening psychiatric morbidity and mortality. BD affects 1-2% of the general population and consumes a substantial portion of mental healthcare resources worldwide. It typically has a remitting and relapsing course that cycles between the mood extremes of mania and depression. Psychosis is common and 10-20% of patients become suicides.

[0004] Recent genetic association studies have shown a strong genetic association between BD and CACNA1C, one of the four possible L-type Calcium Channel alpha-1 subunit genes (see FIG. 1). The CACNA1C genetic risk allele is a functional regulator of expression of this subunit in one region in human brain [Gershon et al., Mol Psychiatry 19(8):890-4 (2013)]. Calcium channels are ubiquitous in synapses between excitable cells, including neurons and cardiac muscle cells (myocytes).

[0005] Calcium Channel Blockers (CCBs) were first discovered in 1964. CCBs affecting the L-type calcium channel continue to be used for their effects on the heart, as treatment for high blood pressure and for heart rhythm abnormalities. Clinicians soon noted that a substantial proportion of Bipolar patients treated with CCBs for cardiovascular disorder appeared to have improvement in their mood disorder. Published reports on treatment of BD with CCBs first appeared in 1982 [Caillard and Masse, Encephale 8:587-594 (1982)], and there were numerous reports over the following two decades, as reviewed by Cassamassima [Casamassima et al., Am J Med Genet B Neuropsychiatr Genet 153B: 1373-1393 (2010)].

[0006] While there have been multiple reports of improvement in manic patients treated with Verapamil and other CCBs, systematic trials demonstrating statistically significant effectiveness of CCBs in BD patients are lacking [Casamassima et al., 2010, supra].

### SUMMARY

[0007] The data from previous studies support that response to CCB therapy in BD patients varies. As supported by data presented herein, variability in patient response to CCB treatment is due to genetic differences among BD patients. More specifically, BD patients with the CACNA1C risk allele demonstrate reduced expression of the calcium channel gene and, BD patients who do not have the CACNA1C risk allele or have only one copy of the CACNA1C risk allele are, therefore, better responders to CCB treatment.

[0008] Provided herein are methods of treating a mood disorder in a subject. In exemplary embodiments, the method comprises (a) analyzing a sample obtained from the subject for the presence of an allele [A] of CACNA1C, wherein allele [A] comprises the sequence of polymorphic marker rs1006737; and (b) administering to the subject a calcium channel blocker (CCB) when no more than one copy of allele [A] is present in the cells of the sample.

[0009] Provided herein is a method of treating a mood disorder in a subject from which a sample was obtained, wherein the copy number of allele [A] of CACNA1C, comprising the sequence of polymorphic marker rs1006737, in the sample has been analyzed. Such a method comprises the step of administering to the subject an effective amount of a calcium channel blocker (CCB) when no more than one copy of the [A] allele is present in the cells of the sample.

[0010] A method of determining a treatment regimen for a subject with a mood disorder is further provided herein. In exemplary embodiments, the method comprises (a) analyzing a sample obtained from a subject with a mood disorder for the presence of allele [A] of CACNA1C, wherein allele [A] comprises the sequence of the polymorphic marker rs1006737; and (b) selecting a treatment regimen comprising administration of a calcium channel blocker (CCB), when no more than one copy of allele [A] is present in the cells of the sample.

[0011] A method of identifying a population of mood disorder patients amenable to treatment with a calcium channel blocker is also provided herein. In exemplary aspects, the method comprises (a) analyzing a sample obtained from a patient with a mood disorder for the presence of allele [A] of CACNA1C, wherein allele [A] comprises the sequence of the polymorphic marker rs1006737; and (b) identifying the patient as amenable to treatment with a calcium channel blocker when no more than one copy of allele [A] is present in the cells of the sample.

[0012] Related systems, e.g., computer systems, comprising a processor; a memory device coupled to the processor, and machine readable instructions stored on the memory device, are provided herein. In exemplary embodiments, the system comprises machine readable instructions that, when executed by the processor, cause the processor to: (a) receive a data value, a, that is a copy number determination of allele [A] of CACNA1C, wherein allele [A] comprises the sequence of polymorphic marker rs1006737, in the cells of a sample obtained from a subject; and (b) display an output relating to treating the subject for a mood disorder with a calcium channel blocker (CCB), when a is less than the diploid copy number of 2.

[0013] Related computer-readable storage media are also provided herein. In exemplary aspects, a computer-readable storage medium having stored thereon machine-readable instructions executable by a processor is provided. In exemplary aspects, the machine-readable instructions comprise: (a) instructions for receiving a data value, a, relating to the copy number of allele [A] of CACNA1C , wherein allele [A] comprises the sequence of the polymorphic marker rs1006737, in the cells of a sample obtained from a subject; and (b) instructions for displaying an output relating to treating the subject for a mood disorder with a calcium channel blocker (CCB), when a is less than the diploid copy number of 2.

[0014] Related methods implemented by a processor in a computer are provided herein. In exemplary embodiments, the method comprises (a) receiving a data value, a, relating to the copy number of allele [A] of CACNA1C, wherein allele [A] comprises the sequence of the polymorphic marker rs1006737, in the cells of a sample obtained from a subject; and (b) displaying an output relating to treating the subject for a mood disorder with a calcium channel blocker (CCB), when α is less than the diploid copy number of 2.

### BRIEF DESCRIPTION OF THE DRAWINGS

[0015] FIG. 1 is an illustration of an L-type calcium channel in the cell membrane. The L-type calcium channel controls the inward flow of calcium, an essential process in cell signaling. (Diagram from Wikipedia.)

[0016] FIG. 2 is an illustration of Timothy Syndrome type 2, functional mutations in Cav1.2, the protein product of CACNA1C. The mutation of the patient described in Example 1 is G4025. (Figure taken from Splawski et al., 2005.)

### DETAILED DESCRIPTION

[0017] Methods of Treating Mood Disorder

[0018] The invention provides methods of treating a mood disorder in a subject. In exemplary embodiments, the method comprises (a) analyzing a sample obtained from the subject for the presence of an allele [A] of CACNA1C, wherein allele [A] comprises the sequence of polymorphic marker rs1006737; and (b) administering to the subject a calcium channel blocker (CCB) when no more than one copy of allele [A] is present in the cells of the sample.

[0019] The invention also provides a method of treating a mood disorder in a subject from which a sample was obtained, wherein the copy number of allele [A] of CACNA1C, comprising the sequence of polymorphic marker rs1006737, in the sample has been analyzed. Such a method comprises the step of administering to the subject an effective amount of a calcium channel blocker (CCB) when no more than one copy of the [A] allele is present in the cells of the sample.

[0020] In exemplary aspects, the method of treating a mood disorder comprises administering to the subject a CCB when the subject is heterozygous for allele [A]. In exemplary aspects, the method of treating a mood disorder comprises administering to the subject a CCB when only one copy of the [A] allele is present in the cells of the sample. In exemplary aspects, the method of treating a mood disorder comprises administering to the subject a CCB when allele [A] is absent from the cells of the sample.

[0021] As used herein, the term “treat” as well as words stemming therefrom, e.g., “treating” and “treatment” do not necessarily imply 100% or complete treatment. Rather, there are varying degrees of treatment of which one of ordinary skill in the art recognizes as having a potential benefit or therapeutic effect. In this respect, the inventive methods can provide any amount of any level of treatment of the mood disorder in a subject. Furthermore, the treatment provided by the inventive method can include treatment of one or more conditions or symptoms of the disease, e.g., mood disorder, being treated.

[0022] Methods of Determining a Treatment Regimen for a Subject with Mood Disorder

[0023] The invention provides a method of determining a treatment regimen for a subject with a mood disorder is further provided herein. In exemplary embodiments, the method comprises (a) analyzing a sample obtained from a subject with a mood disorder for the presence of allele [A] of CACNA1C, wherein allele [A] comprises the sequence of the polymorphic marker rs1006737; and (b) selecting a treatment regimen comprising administration of a calcium channel blocker (CCB), when no more than one copy of allele [A] is present in the cells of the sample.

[0024] In exemplary aspects, the method of determining a treatment regimen for a subject with a mood disorder comprises selecting a treatment regimen comprising administration of a CCB, when the subject is heterozygous for the [A] allele. In exemplary aspects, the method of determining a treatment regimen for a subject with a mood disorder comprises selecting a treatment regimen comprising administration of a CCB, when only one copy of the [A] allele is present in the cells of the sample. In exemplary embodiments, the method of treating a mood disorder comprises selecting a treatment regimen comprising administration of a CCB, when allele [A] is absent from the sample.

[0025] Methods of Identifying a Population of Mood Disorder Patients Amenable to Treatment with a Calcium Channel Blocker

[0026] The invention also provides a method of identifying a population of mood disorder patients amenable to treatment with a calcium channel blocker is also provided herein. In exemplary aspects, the method comprises (a) analyzing a sample obtained from a patient with a mood disorder for the presence of allele [A] of CACNA1C, wherein allele [A] comprises the sequence of the polymorphic marker rs1006737; and (b) identifying the patient as amenable to treatment with a calcium channel blocker when no more than one copy of allele [A] is present in the cells of the sample.

[0027] The invention further provides a method of identifying a patient with a mood disorder as amenable to treatment with a calcium channel blocker is also provided herein. In exemplary aspects, the method comprises (a) analyzing a sample obtained from a patient with a mood disorder for the presence of allele [A] of CACNA1C, wherein allele [A] comprises the sequence of the polymorphic marker rs1006737; and (b) identifying the patient as amenable to treatment with a calcium channel blocker when no more than one copy of allele [A] is present in the cells of the sample.

[0028] In exemplary aspects, the method of identifying a population or a patient as amenable to treatment with a calcium channel blocker comprises identifying the patient as amenable to treatment with a calcium channel blocker, when the subject is heterozygous for the [A] allele. In exemplary aspects, the method of identifying a population or a patient as amenable to treatment with a calcium channel blocker comprises identifying the patient as amenable to treatment with a calcium channel blocker, when only one copy of the [A] allele is present in the cells of the sample. In exemplary embodiments, the method of identifying a population or a patient as amenable to treatment with a calcium channel blocker comprises identifying the patient as amenable to treatment with a calcium channel blocker, when allele [A] is absent from the sample.

[0029] Biomarkers and Measurement Thereof

[0030] In certain methods of the invention, a sample obtained from the subject with a mood disorder is analyzed for the presence of allele [A] of CACNA1C, or the copy number of allele [A] of CACNA1C, wherein allele [A] comprises the sequence of the polymorphic marker rs1006737. The CACNA1C gene is provided herein as SEQ ID NO: 1 and is publically available as National Center for Biotechnology Information (NCBI) Reference Sequence NG_{—}008801.2. The sequence of the polymorphic marker rs1006737 is provided herein as SEQ ID NO: 2. In SEQ ID NO: 2, the nucleotide at position 2282 is represented as “R” and, when R at position 2282 is G, the wild-type allele is represented, and, when R is A, the mutant risk allele is represented. The mutant risk allele, also referred to herein as “the risk allele” or “allele [A] of CACNA1C” or “allele [A]” comprises the sequence of SEQ ID NO: 3. In SEQ ID NO: 1, the polymorphic site is located at position 270344. SEQ ID NO: 1 includes the wild-type G at this position.

[0031] The sample may be analyzed for the presence of allele [A] or the copy number of allele [A] of CACNA1C by methods known in the art. In exemplary embodiments, the sample is analyzed for the sequence of CACNA1C. For example, the sample comprises saliva or cells, e.g., blood cells, neuronal cells, or brain cells, obtained from the subject, and the sequence of the genomic DNA of the cells is determined. In more particular aspects, the sequence of the CACNA1C gene, or a region thereof comprising the polymorphic site (i.e., position 2282 of SEQ ID NO: 2), of the genomic DNA of the saliva or cells (e.g., blood or neuronal cells) of the sample obtained from the subject is determined.

[0032] Suitable techniques of obtaining genomic sequence information from cells are known in the art. For example, the sequence data may be obtained through direct analysis of the sequence of the allele of the polymorphic marker. Suitable methods, some of which are described herein, include, for instance, whole genome analysis using a whole genome SNP chip (e.g., Infinium HD BeadChip), cloning for polymorphisms, non-radioactive PCR-single strand conformation polymorphism analysis, denaturing high pressure liquid chromatography (DHPLC), DNA hybridization, computational analysis, single-stranded conformational polymorphism (SSCP), restriction fragment length polymorphism (RFLP), automated fluorescent sequencing; clamped denaturing gel electrophoresis (CDGE); denaturing gradient gel electrophoresis (DGGE), mobility shift analysis, restriction enzyme analysis; heteroduplex analysis, chemical mismatch cleavage (CMC), RNase protection assays, use of polypeptides that recognize nucleotide mismatches, such as E. coli mutS protein, allele-specific PCR, and direct manual sequencing. These and other methods are described in the art (see, for instance, Li et al., Nucleic Acids Research, 28(2): e1 (i-v) (2000); Liu et al., Biochem Cell Bio 80:17-22 (2000); and Burczak et al., Polymorphism Detection and Analysis, Eaton Publishing, 2000; Sheffield et al., Proc. Natl. Acad. Sci. USA, 86:232-236 (1989); Orita et al., Proc. Natl. Acad. Sci. USA, 86:2766-2770 (1989); Flavell et al., Cell, 15:25-41 (1978); Geever et al., Proc. Natl. Acad. Sci. USA, 78:5081-5085 (1981); Cotton et al., Proc. Natl. Acad. Sci. USA, 85:4397-4401 (1985); Myers et al., Science 230:1242-1246 (1985); Church and Gilbert, Proc. Natl. Acad. Sci. USA, 81:1991-1995 (1988); Sanger et al., Proc. Natl. Acad. Sci. USA, 74:5463-5467 (1977); and Beavis et al., U.S. Pat. No. 5,288,644).

[0033] In exemplary embodiments, a hybridization method (see Current Protocols in Molecular Biology, Ausubel et al., eds., John Wiley & Sons, including all supplements) is used to analyze the sample for the presence (or absence) of allele [A]. A sample of genomic DNA, RNA, or cDNA is obtained from a subject. The DNA, RNA, or cDNA sample is then examined by incubating a sequence-specific nucleic acid probe with the DNA, RNA, or cDNA. A “nucleic acid probe”, as used herein, can be a DNA probe or an RNA probe that hybridizes to a complementary sequence. In exemplary aspects, the sequence-specific nucleic acid probe is designed to specifically hybridize to the sequence of allele [A]. One of skill in the art would know how to design such a probe so that sequence specific hybridization will occur only if a particular allele is present in a genomic sequence from a sample.

[0034] In exemplary aspects, the nucleic acid probe is conjugated to a detectable label. The detectable label, in exemplary aspects, is a radioisotope, a fluorophore, or an element particle. In a preferred embodiment, the DNA template containing the SNP polymorphism is amplified by Polymerase Chain Reaction (PCR) prior to detection.

[0035] Additional Steps

[0036] In exemplary aspects, the method may include additional steps. For example, the method may include repeating one or more of the recited step(s) of the method. In exemplary aspects, the methods comprises repeating the step of analyzing a sample obtained from the subject for the presence of an allele [A] of CACNA1C, wherein allele [A] comprises the sequence of polymorphic marker rs1006737. In alternative or additional aspects, the method of the invention comprises repeating the step of administering to the subject a CCB when no more than one copy of allele [A] is present in the cells of the sample.

[0037] In exemplary aspects, the repeated steps are carried out regularly. For example, the method may comprise analyzing a sample obtained from the subject for the presence of an allele [A] of CACNA1C daily, every 2 days, every 3 days, every 4 days, every 5 days, every 6 days, weekly, every 2 weeks, monthly, every 2 months, every 3 months, quarterly, bi-annually, or annually. Optionally, the sample is obtained from the subject at each instance.

[0038] In exemplary aspects, the method comprises analyzing the sample for CACNA1C expression. In exemplary aspects, the method comprises measuring the sample for a gene product encoded by CACNA1C. In exemplary aspects, the method comprises measuring the levels of RNA encoded by CACNA1C. In alternative or additional aspects, the method comprises measuring CACNA1C protein encoded by CACNA1C. In exemplary aspects, the method comprises measuring one or more CACNA1C isoforms, including but not limited to any of the following isoforms:

NCBI Reference Sequence for the mRNA → NCBI Reference Sequence for the
protein sequence, isoform name

NM_000719.6 (SEQ ID NO: 4)→ NP_000710.5 (SEQ ID NO: 5) voltage-dependent
L-type calcium channel subunit alpha-1C isoform 18
NM_001129827.1 (SEQ ID NO: 6)→ NP_001123299.1 (SEQ ID NO: 7) voltage-
dependent L-type calcium channel subunit alpha-1C isoform 2
NM_001129829.1 (SEQ ID NO: 8)→ NP_001123301.1 (SEQ ID NO: 9) voltage-
dependent L-type calcium channel subunit alpha-1C isoform 3
NM_001129830.2 (SEQ ID NO: 10)→ NP_001123302.2 (SEQ ID NO: 11) voltage-
dependent L-type calcium channel subunit alpha-1C isoform 4
NM_001129831.1 (SEQ ID NO: 12)→ NP_001123303.1 (SEQ ID NO: 13) voltage-
dependent L-type calcium channel subunit alpha-1C isoform 5
NM_001129832.1 (SEQ ID NO: 14)→ NP_001123304.1 (SEQ ID NO: 15) voltage-
dependent L-type calcium channel subunit alpha-1C isoform 6
NM_001129833.1 (SEQ ID NO: 16)→ NP_001123305.1 (SEQ ID NO: 17) voltage-
dependent L-type calcium channel subunit alpha-1C isoform 7
NM_001129834.1 (SEQ ID NO: 18)→ NP_001123306.1 (SEQ ID NO: 19) voltage-
dependent L-type calcium channel subunit alpha-1C isoform 8
NM_001129835.1 (SEQ ID NO: 20)→ NP_001123307.1 (SEQ ID NO: 21) voltage-
dependent L-type calcium channel subunit alpha-1C isoform 9
NM_001129836.1 (SEQ ID NO: 22)→ NP_001123308.1 (SEQ ID NO: 23) voltage-
dependent L-type calcium channel subunit alpha-1C isoform 10
NM_001129837.1 (SEQ ID NO: 24)→ NP_001123309.1 (SEQ ID NO: 25) voltage-
dependent L-type calcium channel subunit alpha-1C isoform 11
NM_001129838.1 (SEQ ID NO: 26)→ NP_001123310.1 (SEQ ID NO: 27) voltage-
dependent L-type calcium channel subunit alpha-1C isoform 12
NM_001129839.1 (SEQ ID NO: 28)→ NP_001123311.1 (SEQ ID NO: 29) voltage-
dependent L-type calcium channel subunit alpha-1C isoform 13
NM_001129840.1 (SEQ ID NO: 30)→ NP_001123312.1 (SEQ ID NO: 31) voltage-
dependent L-type calcium channel subunit alpha-1C isoform 14
NM_001129841.1 (SEQ ID NO: 32)→ NP_001123313.1 (SEQ ID NO: 33) voltage-
dependent L-type calcium channel subunit alpha-1C isoform 15
NM_001129842.1 (SEQ ID NO: 34)→ NP_001123314.1 (SEQ ID NO: 35) voltage-
dependent L-type calcium channel subunit alpha-1C isoform 16
NM_001129843.1 (SEQ ID NO: 36)→ NP_001123315.1 (SEQ ID NO: 37) voltage-
dependent L-type calcium channel subunit alpha-1C isoform 17
NM_001129844.1 (SEQ ID NO: 38)→ NP_001123316.1 (SEQ ID NO: 39) voltage-
dependent L-type calcium channel subunit alpha-1C isoform 19
NM_001129846.1 (SEQ ID NO: 40)→ NP_001123318.1 (SEQ ID NO: 41) voltage-
dependent L-type calcium channel subunit alpha-1C isoform 20
NM_001167623.1 (SEQ ID NO: 10)→ NP_001161095.1 (SEQ ID NO: 43) voltage-
dependent L-type calcium channel subunit alpha-1C isoform 21
NM_001167624.2 (SEQ ID NO: 10)→ NP_001161096.2 (SEQ ID NO: 45) voltage-
dependent L-type calcium channel subunit alpha-1C isoform 22
NM_001167625.1 (SEQ ID NO: 46)→ NP_001161097.1 (SEQ ID NO: 47) voltage-
dependent L-type calcium channel subunit alpha-1C isoform 23
NM_199460.3 (SEQ ID NO: 48)→ NP_955630.3 (SEQ ID NO: 49) voltage-
dependent L-type calcium channel subunit alpha-1C isoform 1

[0039] Methods of detecting RNA and proteins are known in the art and include, but not limited to, RT-PCR, qPCR, and RNA-Seq, Northern Blot, in situ hybridization, western blot, and ELISA. See, e.g., Sambrook et al., Molecular Cloning: A Laboratory Manual (Fourth Edition), Cold Spring Harbor Laboratory Press, Cold Spring Harbor, N.Y., 2012.

[0040] In exemplary aspects, wherein the method comprises measuring expression levels by measuring nucleic acids, e.g., RNA, mRNA, encoded by CACNA1C, the method further comprises amplifying at least a fragment of the nucleic acids to be measured. In exemplary aspects, the amplification is carried out via PCR or RT-PCR.

[0041] In exemplary aspects, the methods described herein further comprise genotyping the sample for additional polymorphic markers. In exemplary aspects, the method comprises genotyping the sample for one or more of the polymorphic markers listed in Table A. The human DNA sequences associated with these polymorphic markers are known in the art.

TABLE A

| | | | | Located within |
|---|---|---|---|---|
| SNP IDs | chr. | start | end | CACNA1C Gene |
| rs1000823 | chr12 | 3461461 | 3461462 | No |
| rs1001127 | chr12 | 6601742 | 6601743 | No |
| rs1005375 | chr12 | 3436758 | 3436759 | No |
| rs1006696 | chr12 | 3405104 | 3405105 | No |
| rs1006737 | chr12 | 2345294 | 2345295 | Yes |
| rs10153570 | chr2 | 131708648 | 131708649 | No |
| rs1015832 | chr12 | 5690229 | 5690230 | No |
| rs10160993 | chr12 | 2499564 | 2499565 | Yes |
| rs1016388 | chr12 | 2321867 | 2321868 | Yes |
| rs1017101 | chr12 | 6574300 | 6574301 | No |
| rs10219509 | chr12 | 4300808 | 4300809 | No |
| rs1024582 | chr12 | 2402245 | 2402246 | Yes |
| rs1034969 | chr12 | 6573855 | 6573856 | No |
| rs1043262 | chr12 | 6639087 | 6639088 | No |
| rs10437827 | chr12 | 4473328 | 4473329 | No |
| rs10459125 | chr12 | 2309863 | 2309864 | Yes |
| rs10459134 | chr12 | 5879850 | 5879851 | No |
| rs10466913 | chr12 | 6022494 | 6022495 | No |
| rs10491954 | chr12 | 1354344 | 1354345 | No |
| rs10491961 | chr12 | 2115709 | 2115710 | No |
| rs10491969 | chr12 | 3734335 | 3734336 | No |
| rs10492061 | chr12 | 4991284 | 4991285 | No |
| rs10492094 | chr12 | 5478147 | 5478148 | No |
| rs10492097 | chr12 | 6394677 | 6394678 | No |
| rs10492184 | chr12 | 5699047 | 5699048 | No |
| rs10505724 | chr12 | 2782069 | 2782070 | Yes |
| rs1056008 | chr12 | 662837 | 662838 | No |
| rs1060499 | chr12 | 1020265 | 1020266 | No |
| rs1063856 | chr12 | 6153533 | 6153534 | No |
| rs1063857 | chr12 | 6153513 | 6153514 | No |
| rs10735005 | chr12 | 1995402 | 1995403 | No |
| rs10735020 | chr12 | 3414983 | 3414984 | No |
| rs10735026 | chr12 | 3738848 | 3738849 | No |
| rs10744559 | chr12 | 2298297 | 2298298 | Yes |
| rs10744560 | chr12 | 2387098 | 2387099 | Yes |
| rs10744601 | chr12 | 3405901 | 3405902 | No |
| rs10744641 | chr12 | 4436832 | 4436833 | No |
| rs10744648 | chr12 | 586406 | 586407 | No |
| rs10744675 | chr12 | 5145121 | 5145122 | No |
| rs10744700 | chr12 | 6297862 | 6297863 | No |
| rs1076344 | chr12 | 2553987 | 2553988 | Yes |
| rs1076346 | chr12 | 2554277 | 2554278 | Yes |
| rs10773979 | chr12 | 1788863 | 1788864 | No |
| rs10774029 | chr12 | 2280806 | 2280807 | Yes |
| rs10774030 | chr12 | 2292689 | 2292690 | Yes |
| rs10774033 | chr12 | 2314425 | 2314426 | Yes |
| rs10774034 | chr12 | 2330457 | 2330458 | Yes |
| rs10774035 | chr12 | 2368673 | 2368674 | Yes |
| rs10774036 | chr12 | 2386947 | 2386948 | Yes |
| rs10774037 | chr12 | 2420525 | 2420526 | Yes |
| rs10774117 | chr12 | 3219859 | 3219860 | No |
| rs10774120 | chr12 | 3224985 | 3224986 | No |
| rs10774140 | chr12 | 3461601 | 3461602 | No |
| rs10774148 | chr12 | 3557319 | 3557320 | No |
| rs10774152 | chr12 | 495216 | 495217 | No |
| rs10774156 | chr12 | 3664703 | 3664704 | No |
| rs10774167 | chr12 | 3844380 | 3844381 | No |
| rs10774168 | chr12 | 3846298 | 3846299 | No |
| rs10774169 | chr12 | 516345 | 516346 | No |
| rs10774224 | chr12 | 4471634 | 4471635 | No |
| rs10774232 | chr12 | 4518168 | 4518169 | No |
| rs10774250 | chr12 | 4735427 | 4735428 | No |
| rs10774324 | chr12 | 5476396 | 5476397 | No |
| rs10774325 | chr12 | 5476904 | 5476905 | No |
| rs10774333 | chr12 | 5563166 | 5563167 | No |
| rs10774334 | chr12 | 5611798 | 5611799 | No |
| rs10774353 | chr12 | 5767173 | 5767174 | No |
| rs10774376 | chr12 | 5941323 | 5941324 | No |
| rs10774403 | chr12 | 6277310 | 6277311 | No |
| rs10774405 | chr12 | 6285390 | 6285391 | No |
| rs10774466 | chr12 | 939301 | 939302 | No |
| rs10848438 | chr12 | 1211575 | 1211576 | No |
| rs10848476 | chr12 | 1587159 | 1587160 | No |
| rs10848587 | chr12 | 2002361 | 2002362 | No |
| rs10848596 | chr12 | 2034886 | 2034887 | No |
| rs10848600 | chr12 | 2083927 | 2083928 | No |
| rs10848622 | chr12 | 2274050 | 2274051 | Yes |
| rs10848623 | chr12 | 359462 | 359463 | No |
| rs10848627 | chr12 | 2312407 | 2312408 | Yes |
| rs10848628 | chr12 | 2312488 | 2312489 | Yes |
| rs10848629 | chr12 | 2312896 | 2312897 | Yes |
| rs10848632 | chr12 | 2315992 | 2315993 | Yes |
| rs10848633 | chr12 | 2316018 | 2316019 | Yes |
| rs10848634 | chr12 | 2316126 | 2316127 | Yes |
| rs10848635 | chr12 | 2316194 | 2316195 | Yes |
| rs10848636 | chr12 | 2316492 | 2316493 | Yes |
| rs10848637 | chr12 | 2316553 | 2316554 | Yes |
| rs10848642 | chr12 | 2331571 | 2331572 | Yes |
| rs10848644 | chr12 | 365288 | 365289 | No |
| rs10848645 | chr12 | 2420243 | 2420244 | Yes |
| rs10848649 | chr12 | 2460085 | 2460086 | Yes |
| rs10848683 | chr12 | 2791129 | 2791130 | Yes |
| rs10848703 | chr12 | 2882249 | 2882250 | No |
| rs10848784 | chr12 | 3188513 | 3188514 | No |
| rs10848789 | chr12 | 3195201 | 3195202 | No |
| rs10848803 | chr12 | 3222755 | 3222756 | No |
| rs10848818 | chr12 | 3293243 | 3293244 | No |
| rs10848821 | chr12 | 3298030 | 3298031 | No |
| rs10848863 | chr12 | 3561809 | 3561810 | No |
| rs10848895 | chr12 | 3749311 | 3749312 | No |
| rs10848905 | chr12 | 507788 | 507789 | No |
| rs10848914 | chr12 | 3844094 | 3844095 | No |
| rs10848918 | chr12 | 3853328 | 3853329 | No |
| rs10849017 | chr12 | 4322050 | 4322051 | No |
| rs10849038 | chr12 | 4437378 | 4437379 | No |
| rs10849059 | chr12 | 4521663 | 4521664 | No |
| rs10849087 | chr12 | 4650064 | 4650065 | No |
| rs10849168 | chr12 | 4986995 | 4986996 | No |
| rs10849175 | chr12 | 5030706 | 5030707 | No |
| rs10849216 | chr12 | 5322961 | 5322962 | No |
| rs10849222 | chr12 | 5369482 | 5369483 | No |
| rs10849261 | chr12 | 5522555 | 5522556 | No |
| rs10849265 | chr12 | 5532011 | 5532012 | No |
| rs10849290 | chr12 | 5663171 | 5663172 | No |
| rs10849298 | chr12 | 5691999 | 5692000 | No |
| rs10849310 | chr12 | 5752724 | 5752725 | No |
| rs10849401 | chr12 | 6273237 | 6273238 | No |
| rs10849414 | chr12 | 6286369 | 6286370 | No |
| rs10849573 | chr12 | 982320 | 982321 | No |
| rs10849575 | chr12 | 230403 | 230404 | No |
| rs11061839 | chr12 | 1655448 | 1655449 | No |
| rs11062012 | chr12 | 1982124 | 1982125 | No |
| rs11062038 | chr12 | 2089229 | 2089230 | No |
| rs11062040 | chr12 | 2091256 | 2091257 | No |
| rs11062055 | chr12 | 2107300 | 2107301 | No |
| rs11062057 | chr12 | 2114605 | 2114606 | No |
| rs11062068 | chr12 | 2121723 | 2121724 | No |
| rs11062114 | chr12 | 2198826 | 2198827 | Yes |
| rs11062145 | chr12 | 2297352 | 2297353 | Yes |
| rs11062156 | chr12 | 2317522 | 2317523 | Yes |
| rs11062159 | chr12 | 2326223 | 2326224 | Yes |
| rs11062161 | chr12 | 2329969 | 2329970 | Yes |
| rs11062162 | chr12 | 2332103 | 2332104 | Yes |
| rs11062170 | chr12 | 2348843 | 2348844 | Yes |
| rs11062196 | chr12 | 2460106 | 2460107 | Yes |
| rs11062197 | chr12 | 2460387 | 2460388 | Yes |
| rs11062290 | chr12 | 2745150 | 2745151 | Yes |
| rs11062293 | chr12 | 2748274 | 2748275 | Yes |
| rs11062309 | chr12 | 2784987 | 2784988 | Yes |
| rs11062351 | chr12 | 2881762 | 2881763 | No |
| rs11062385 | chr12 | 427574 | 427575 | No |
| rs11062630 | chr12 | 3474413 | 3474414 | No |
| rs11062739 | chr12 | 3711361 | 3711362 | No |
| rs11062745 | chr12 | 3724582 | 3724583 | No |
| rs11062747 | chr12 | 3750108 | 3750109 | No |
| rs11062752 | chr12 | 3757387 | 3757388 | No |
| rs11062760 | chr12 | 3788528 | 3788529 | No |
| rs11062770 | chr12 | 3822839 | 3822840 | No |
| rs11062772 | chr12 | 3826642 | 3826643 | No |
| rs11062776 | chr12 | 3831992 | 3831993 | No |
| rs11062778 | chr12 | 3834326 | 3834327 | No |
| rs11062885 | chr12 | 3978660 | 3978661 | No |
| rs11062886 | chr12 | 3980955 | 3980956 | No |
| rs11062932 | chr12 | 4064155 | 4064156 | No |
| rs11063022 | chr12 | 4296516 | 4296517 | No |
| rs11063027 | chr12 | 4299312 | 4299313 | No |
| rs11063069 | chr12 | 4374372 | 4374373 | No |
| rs11063099 | chr12 | 4462504 | 4462505 | No |
| rs11063101 | chr12 | 4466402 | 4466403 | No |
| rs11063182 | chr12 | 4581370 | 4581371 | No |
| rs11063189 | chr12 | 4588247 | 4588248 | No |
| rs11063199 | chr12 | 4591853 | 4591854 | No |
| rs11063205 | chr12 | 4597744 | 4597745 | No |
| rs11063207 | chr12 | 4603697 | 4603698 | No |
| rs11063282 | chr12 | 4760977 | 4760978 | No |
| rs11063426 | chr12 | 5065592 | 5065593 | No |
| rs11063462 | chr12 | 5121112 | 5121113 | No |
| rs11063468 | chr12 | 5135473 | 5135474 | No |
| rs11063476 | chr12 | 5140981 | 5140982 | No |
| rs11063490 | chr12 | 5191130 | 5191131 | No |
| rs11063539 | chr12 | 658113 | 658114 | No |
| rs11063567 | chr12 | 5322550 | 5322551 | No |
| rs11063623 | chr12 | 5453278 | 5453279 | No |
| rs11063634 | chr12 | 5470168 | 5470169 | No |
| rs11063663 | chr12 | 5525569 | 5525570 | No |
| rs11063692 | chr12 | 5571844 | 5571845 | No |
| rs11063806 | chr12 | 708596 | 708597 | No |
| rs11063995 | chr12 | 6136152 | 6136153 | No |
| rs11064020 | chr12 | 6196313 | 6196314 | No |
| rs11064021 | chr12 | 6196412 | 6196413 | No |
| rs11064024 | chr12 | 6202048 | 6202049 | No |
| rs11064153 | chr12 | 6488449 | 6488450 | No |
| rs11064294 | chr12 | 805450 | 805451 | No |
| rs11064562 | chr12 | 945321 | 945322 | No |
| rs1108073 | chr12 | 2333637 | 2333638 | Yes |
| rs1108074 | chr12 | 2333483 | 2333484 | Yes |
| rs1108221 | chr12 | 2332794 | 2332795 | Yes |
| rs1108222 | chr12 | 2332855 | 2332856 | Yes |
| rs1108385 | chr12 | 2482329 | 2482330 | Yes |
| rs11559856 | chr12 | 5850903 | 5850904 | No |
| rs11609462 | chr12 | 1590068 | 1590069 | No |
| rs11609728 | chr12 | 6139691 | 6139692 | No |
| rs11609815 | chr12 | 6134230 | 6134231 | No |
| rs11610204 | chr12 | 3510916 | 3510917 | No |
| rs11610629 | chr12 | 6137455 | 6137456 | No |
| rs11611163 | chr12 | 4279482 | 4279483 | No |
| rs11611543 | chr12 | 5476043 | 5476044 | No |
| rs11611917 | chr12 | 6136633 | 6136634 | No |
| rs11612401 | chr12 | 6136967 | 6136968 | No |
| rs11612864 | chr12 | 2462222 | 2462223 | Yes |
| rs11613331 | chr12 | 351466 | 351467 | No |
| rs11613469 | chr12 | 2074021 | 2074022 | No |
| rs11613749 | chr12 | 3708498 | 3708499 | No |
| rs11614030 | chr12 | 4769875 | 4769876 | No |
| rs11614912 | chr12 | 6148554 | 6148555 | No |
| rs11615941 | chr12 | 3556798 | 3556799 | No |
| rs11616050 | chr12 | 783349 | 783350 | No |
| rs11616055 | chr12 | 3849592 | 3849593 | No |
| rs11616162 | chr12 | 4591080 | 4591081 | No |
| rs11677224 | chr2 | 88789814 | 88789815 | No |
| rs11835708 | chr12 | 3515553 | 3515554 | No |
| rs12191018 | chr6 | 153479725 | 153479726 | No |
| rs12230555 | chr12 | 4418783 | 4418784 | No |
| rs12303498 | chr12 | 3411437 | 3411438 | No |
| rs12304321 | chr12 | 5163047 | 5163048 | No |
| rs12304385 | chr12 | 5898503 | 5898504 | No |
| rs12315711 | chr12 | 2346829 | 2346830 | Yes |
| rs12320409 | chr12 | 3428427 | 3428428 | No |
| rs12368779 | chr12 | 1982150 | 1982151 | No |
| rs12369414 | chr12 | 915769 | 915770 | No |
| rs12369484 | chr12 | 6271972 | 6271973 | No |
| rs12370980 | chr12 | 3849483 | 3849484 | No |
| rs12422231 | chr12 | 3803565 | 3803566 | No |
| rs12422554 | chr12 | 2312619 | 2312620 | Yes |
| rs12423086 | chr12 | 1344140 | 1344141 | No |
| rs12423234 | chr12 | 4930359 | 4930360 | No |
| rs12423277 | chr12 | 2314318 | 2314319 | Yes |
| rs12423361 | chr12 | 3657685 | 3657686 | No |
| rs12423920 | chr12 | 5047775 | 5047776 | No |
| rs12424245 | chr12 | 2322512 | 2322513 | Yes |
| rs12425157 | chr12 | 1357859 | 1357860 | No |
| rs12426185 | chr12 | 5709634 | 5709635 | No |
| rs12470817 | chr2 | 131703693 | 131703694 | No |
| rs12473388 | chr2 | 45549304 | 45549305 | No |
| rs12579294 | chr12 | 3289944 | 3289945 | No |
| rs12580433 | chr12 | 5800575 | 5800576 | No |
| rs12811453 | chr12 | 4761010 | 4761011 | No |
| rs12816718 | chr12 | 969799 | 969800 | No |
| rs12817188 | chr12 | 5567618 | 5567619 | No |
| rs12818111 | chr12 | 3501260 | 3501261 | No |
| rs12823931 | chr12 | 4467920 | 4467921 | No |
| rs12825233 | chr12 | 5453776 | 5453777 | No |
| rs12830185 | chr12 | 5101463 | 5101464 | No |
| rs13395344 | chr2 | 88795167 | 88795168 | No |
| rs1355685 | chr3 | 145892710 | 145892711 | No |
| rs1420402 | chr12 | 5377547 | 5377548 | No |
| rs1421181 | chr18 | 43068785 | 43068786 | No |
| rs1468765 | chr12 | 4296893 | 4296894 | No |
| rs1532609 | chr12 | 232122 | 232123 | No |
| rs1544502 | chr12 | 2438809 | 2438810 | Yes |
| rs1544514 | chr12 | 2558185 | 2558186 | Yes |
| rs1544608 | chr12 | 5813533 | 5813534 | No |
| rs1548904 | chr12 | 372381 | 372382 | No |
| rs1558142 | chr12 | 2022410 | 2022411 | No |
| rs1558321 | chr12 | 2230319 | 2230320 | Yes |
| rs1558322 | chr12 | 2230054 | 2230055 | Yes |
| rs1558325 | chr12 | 6289107 | 6289108 | No |
| rs1558506 | chr12 | 5750895 | 5750896 | No |
| rs1558507 | chr12 | 5747821 | 5747822 | No |
| rs1558508 | chr12 | 5743213 | 5743214 | No |
| rs1610056 | chr12 | 6195396 | 6195397 | No |
| rs16928082 | chr12 | 6396155 | 6396156 | No |
| rs16928108 | chr12 | 989396 | 989397 | No |
| rs16930578 | chr12 | 3691436 | 3691437 | No |
| rs16931965 | chr12 | 976486 | 976487 | No |
| rs16932084 | chr12 | 1080853 | 1080854 | No |
| rs16933825 | chr12 | 5842890 | 5842891 | No |
| rs17178877 | chr12 | 5175402 | 5175403 | No |
| rs17179631 | chr12 | 5295432 | 5295433 | No |
| rs17179798 | chr12 | 5314507 | 5314508 | No |
| rs17722632 | chr12 | 5571980 | 5571981 | No |
| rs17754970 | chr12 | 773261 | 773262 | No |
| rs17769092 | chr12 | 3464296 | 3464297 | No |
| rs17769954 | chr12 | 3699213 | 3699214 | No |
| rs17770663 | chr12 | 3791142 | 3791143 | No |
| rs17778793 | chr12 | 5444246 | 5444247 | No |
| rs17778948 | chr12 | 5478112 | 5478113 | No |
| rs17835992 | chr12 | 3668988 | 3668989 | No |
| rs1800380 | chr12 | 6138594 | 6138595 | No |
| rs1808285 | chr12 | 3852359 | 3852360 | No |
| rs1860002 | chr12 | 2413802 | 2413803 | Yes |
| rs1860004 | chr12 | 2477048 | 2477049 | Yes |
| rs1860048 | chr12 | 2058694 | 2058695 | No |
| rs1860053 | chr12 | 1964415 | 1964416 | No |
| rs1860056 | chr12 | 2311835 | 2311836 | Yes |
| rs1860363 | chr12 | 6276532 | 6276533 | No |
| rs1860365 | chr12 | 6147109 | 6147110 | No |
| rs1860431 | chr12 | 3183026 | 3183027 | No |
| rs1860449 | chr12 | 3674830 | 3674831 | No |
| rs1861584 | chr12 | 5707817 | 5707818 | No |
| rs1972582 | chr12 | 374301 | 374302 | No |
| rs2007044 | chr12 | 2344959 | 2344960 | Yes |
| rs2008134 | chr12 | 6588444 | 6588445 | No |
| rs2010932 | chr12 | 2085981 | 2085982 | No |
| rs2013064 | chr12 | 1998043 | 1998044 | No |
| rs2013195 | chr12 | 3840420 | 3840421 | No |
| rs2016141 | chr12 | 5146002 | 5146003 | No |
| rs2017273 | chr12 | 2100022 | 2100023 | No |
| rs2041135 | chr12 | 2101497 | 2101498 | No |
| rs2058349 | chr12 | 3844595 | 3844596 | No |
| rs2058468 | chr12 | 5819953 | 5819954 | No |
| rs2072373 | chr12 | 6631887 | 6631888 | No |
| rs2072374 | chr12 | 6637844 | 6637845 | No |
| rs2075031 | chr12 | 669037 | 669038 | No |
| rs2075316 | chr12 | 4492805 | 4492806 | No |
| rs2075317 | chr12 | 4492314 | 4492315 | No |
| rs2079867 | chr12 | 6622110 | 6622111 | No |
| rs2079868 | chr12 | 6622345 | 6622346 | No |
| rs2080105 | chr12 | 5780595 | 5780596 | No |
| rs2107613 | chr12 | 888427 | 888428 | No |
| rs2108570 | chr12 | 2421587 | 2421588 | Yes |
| rs2108638 | chr12 | 2065369 | 2065370 | No |
| rs2108639 | chr12 | 1973383 | 1973384 | No |
| rs2109112 | chr12 | 3987472 | 3987473 | No |
| rs2109425 | chr12 | 4977334 | 4977335 | No |
| rs2109426 | chr12 | 6589521 | 6589522 | No |
| rs2158502 | chr12 | 936467 | 936468 | No |
| rs2159100 | chr12 | 2346392 | 2346393 | Yes |
| rs2159407 | chr12 | 3186923 | 3186924 | No |
| rs2159410 | chr12 | 3112728 | 3112729 | No |
| rs216011 | chr12 | 2725617 | 2725618 | Yes |
| rs216014 | chr12 | 2730450 | 2730451 | Yes |
| rs216043 | chr12 | 2760343 | 2760344 | Yes |
| rs216046 | chr12 | 2764000 | 2764001 | Yes |
| rs216325 | chr12 | 6145528 | 6145529 | No |
| rs216327 | chr12 | 6146148 | 6146149 | No |
| rs216329 | chr12 | 6146506 | 6146507 | No |
| rs216334 | chr12 | 6147610 | 6147611 | No |
| rs216855 | chr12 | 6085512 | 6085513 | No |
| rs216856 | chr12 | 6086264 | 6086265 | No |
| rs216865 | chr12 | 6090302 | 6090303 | No |
| rs216867 | chr12 | 6090999 | 6091000 | No |
| rs216873 | chr12 | 6095273 | 6095274 | No |
| rs2189669 | chr12 | 1586845 | 1586846 | No |
| rs2190769 | chr12 | 2008798 | 2008799 | No |
| rs2190770 | chr12 | 2014352 | 2014353 | No |
| rs2191365 | chr12 | 5032639 | 5032640 | No |
| rs2191537 | chr12 | 3851709 | 3851710 | No |
| rs2215738 | chr12 | 5784873 | 5784874 | No |
| rs2229351 | chr12 | 406291 | 406292 | No |
| rs2238022 | chr12 | 2186477 | 2186478 | Yes |
| rs2238023 | chr12 | 2202536 | 2202537 | Yes |
| rs2238027 | chr12 | 2216957 | 2216958 | Yes |
| rs2238029 | chr12 | 2218895 | 2218896 | Yes |
| rs2238043 | chr12 | 2275662 | 2275663 | Yes |
| rs2238046 | chr12 | 2299997 | 2299998 | Yes |
| rs2238048 | chr12 | 2300206 | 2300207 | Yes |
| rs2238049 | chr12 | 2306127 | 2306128 | Yes |
| rs2238050 | chr12 | 2306706 | 2306707 | Yes |
| rs2238052 | chr12 | 2307295 | 2307296 | Yes |
| rs2238053 | chr12 | 2317095 | 2317096 | Yes |
| rs2238054 | chr12 | 2317643 | 2317644 | Yes |
| rs2238056 | chr12 | 2327943 | 2327944 | Yes |
| rs2238057 | chr12 | 2384004 | 2384005 | Yes |
| rs2238069 | chr12 | 2456061 | 2456062 | Yes |
| rs2238070 | chr12 | 2456114 | 2456115 | Yes |
| rs2238077 | chr12 | 2466083 | 2466084 | Yes |
| rs2238078 | chr12 | 2472451 | 2472452 | Yes |
| rs2238079 | chr12 | 2473357 | 2473358 | Yes |
| rs2238083 | chr12 | 2487000 | 2487001 | Yes |
| rs2238090 | chr12 | 2683331 | 2683332 | Yes |
| rs2238103 | chr12 | 6194182 | 6194183 | No |
| rs2238104 | chr12 | 6187664 | 6187665 | No |
| rs2239017 | chr12 | 2289650 | 2289651 | Yes |
| rs2239018 | chr12 | 2304356 | 2304357 | Yes |
| rs2239019 | chr12 | 2310309 | 2310310 | Yes |
| rs2239023 | chr12 | 2310615 | 2310616 | Yes |
| rs2239030 | chr12 | 2335940 | 2335941 | Yes |
| rs2239032 | chr12 | 2337137 | 2337138 | Yes |
| rs2239033 | chr12 | 2337745 | 2337746 | Yes |
| rs2239037 | chr12 | 2363715 | 2363716 | Yes |
| rs2239038 | chr12 | 2374129 | 2374130 | Yes |
| rs2239047 | chr12 | 2435705 | 2435706 | Yes |
| rs2239061 | chr12 | 2502511 | 2502512 | Yes |
| rs2239062 | chr12 | 2502571 | 2502572 | Yes |
| rs2239074 | chr12 | 2538548 | 2538549 | Yes |
| rs2239079 | chr12 | 2550817 | 2550818 | Yes |
| rs2239080 | chr12 | 2554688 | 2554689 | Yes |
| rs2239093 | chr12 | 2609561 | 2609562 | Yes |
| rs2239131 | chr12 | 2229058 | 2229059 | Yes |
| rs2239144 | chr12 | 6196182 | 6196183 | No |
| rs2239145 | chr12 | 6195995 | 6195996 | No |
| rs2239147 | chr12 | 6195526 | 6195527 | No |
| rs2240283 | chr12 | 966123 | 966124 | No |
| rs2240610 | chr12 | 2057591 | 2057592 | No |
| rs2240612 | chr12 | 2058244 | 2058245 | No |
| rs2255390 | chr12 | 999761 | 999762 | No |
| rs2270152 | chr12 | 6061068 | 6061069 | No |
| rs2283275 | chr12 | 2184559 | 2184560 | Yes |
| rs2283276 | chr12 | 2184846 | 2184847 | Yes |
| rs2283287 | chr12 | 2298723 | 2298724 | Yes |
| rs2283288 | chr12 | 2299047 | 2299048 | Yes |
| rs2283291 | chr12 | 2337459 | 2337460 | Yes |
| rs2283294 | chr12 | 2423619 | 2423620 | Yes |
| rs2283301 | chr12 | 2446805 | 2446806 | Yes |
| rs2283304 | chr12 | 2473970 | 2473971 | Yes |
| rs2283306 | chr12 | 2489389 | 2489390 | Yes |
| rs2286006 | chr12 | 968488 | 968489 | No |
| rs2286374 | chr12 | 1962758 | 1962759 | No |
| rs2286646 | chr12 | 6061490 | 6061491 | No |
| rs2291094 | chr12 | 5294805 | 5294806 | No |
| rs2291095 | chr12 | 5294346 | 5294347 | No |
| rs2291919 | chr12 | 280348 | 280349 | No |
| rs2291920 | chr12 | 278375 | 278376 | No |
| rs2291922 | chr12 | 275064 | 275065 | No |
| rs2299656 | chr12 | 2165146 | 2165147 | Yes |
| rs2299664 | chr12 | 2226044 | 2226045 | Yes |
| rs2300134 | chr12 | 478854 | 478855 | No |
| rs2301880 | chr12 | 1003836 | 1003837 | No |
| rs2302729 | chr12 | 2783971 | 2783972 | Yes |
| rs2302840 | chr18 | 43072986 | 43072987 | No |
| rs2335817 | chr12 | 3294235 | 3294236 | No |
| rs2361590 | chr12 | 5775386 | 5775387 | No |
| rs2363877 | chr12 | 6292460 | 6292461 | No |
| rs2363878 | chr12 | 6292974 | 6292975 | No |
| rs2363880 | chr12 | 6302008 | 6302009 | No |
| rs2369276 | chr12 | 486172 | 486173 | No |
| rs2369280 | chr12 | 508858 | 508859 | No |
| rs2369703 | chr12 | 1333716 | 1333717 | No |
| rs2370413 | chr12 | 2354869 | 2354870 | Yes |
| rs2370414 | chr12 | 2368395 | 2368396 | Yes |
| rs2370515 | chr12 | 2511161 | 2511162 | Yes |
| rs2370596 | chr12 | 2666347 | 2666348 | Yes |
| rs240826 | chr12 | 5324763 | 5324764 | No |
| rs241966 | chr12 | 3839964 | 3839965 | No |
| rs241970 | chr12 | 3838416 | 3838417 | No |
| rs241975 | chr12 | 3836655 | 3836656 | No |
| rs241978 | chr12 | 3834823 | 3834824 | No |
| rs241982 | chr12 | 3831610 | 3831611 | No |
| rs241983 | chr12 | 3831159 | 3831160 | No |
| rs242012 | chr12 | 3790146 | 3790147 | No |
| rs2429123 | chr12 | 2113146 | 2113147 | No |
| rs2429127 | chr12 | 2116767 | 2116768 | No |
| rs2429135 | chr12 | 2124954 | 2124955 | No |
| rs2429159 | chr12 | 2016321 | 2016322 | No |
| rs2429163 | chr12 | 2022500 | 2022501 | No |
| rs2429175 | chr12 | 2045084 | 2045085 | No |
| rs2470395 | chr12 | 2145297 | 2145298 | No |
| rs2470404 | chr12 | 2049448 | 2049449 | No |
| rs2470425 | chr12 | 2077896 | 2077897 | No |
| rs2534715 | chr12 | 6573145 | 6573146 | No |
| rs2534717 | chr12 | 6573748 | 6573749 | No |
| rs2534721 | chr12 | 6580143 | 6580144 | No |
| rs2607916 | chr12 | 716508 | 716509 | No |
| rs2887533 | chr12 | 1201545 | 1201546 | No |
| rs2887571 | chr12 | 1638170 | 1638171 | No |
| rs2887780 | chr12 | 2499625 | 2499626 | Yes |
| rs2906892 | chr12 | 1995621 | 1995622 | No |
| rs2906893 | chr12 | 1995698 | 1995699 | No |
| rs2907494 | chr12 | 4642183 | 4642184 | No |
| rs2907495 | chr12 | 4638163 | 4638164 | No |
| rs2907499 | chr12 | 4616900 | 4616901 | No |
| rs2970808 | chr12 | 4640361 | 4640362 | No |
| rs2970821 | chr12 | 4519122 | 4519123 | No |
| rs3217830 | chr12 | 4392529 | 4392530 | No |
| rs3217840 | chr12 | 4394876 | 4394877 | No |
| rs3217896 | chr12 | 4404157 | 4404158 | No |
| rs3217898 | chr12 | 4404375 | 4404376 | No |
| rs3217933 | chr12 | 4412999 | 4413000 | No |
| rs35452680 | chr12 | 4277661 | 4277662 | No |
| rs367206 | chr12 | 5757028 | 5757029 | No |
| rs367978 | chr12 | 5756823 | 5756824 | No |
| rs369858 | chr12 | 5801347 | 5801348 | No |
| rs3739127 | chr2 | 131674284 | 131674285 | No |
| rs3741935 | chr12 | 3701389 | 3701390 | No |
| rs3759371 | chr12 | 464253 | 464254 | No |
| rs376708 | chr12 | 5762979 | 5762980 | No |
| rs3782586 | chr12 | 5690884 | 5690885 | No |
| rs3782614 | chr12 | 5775102 | 5775103 | No |
| rs3782642 | chr12 | 5850146 | 5850147 | No |
| rs3782645 | chr12 | 5888252 | 5888253 | No |
| rs3782751 | chr12 | 3673498 | 3673499 | No |
| rs3782752 | chr12 | 3670150 | 3670151 | No |
| rs3782753 | chr12 | 3670038 | 3670039 | No |
| rs3782761 | chr12 | 3652625 | 3652626 | No |
| rs3782803 | chr12 | 3348436 | 3348437 | No |
| rs3782805 | chr12 | 3345978 | 3345979 | No |
| rs3782843 | chr12 | 3113579 | 3113580 | No |
| rs3782860 | chr12 | 361995 | 361996 | No |
| rs3794297 | chr12 | 2338395 | 2338396 | Yes |
| rs380709 | chr12 | 5762089 | 5762090 | No |
| rs3809257 | chr12 | 3864403 | 3864404 | No |
| rs3809263 | chr12 | 773455 | 773456 | No |
| rs381373 | chr12 | 5755326 | 5755327 | No |
| rs3819526 | chr12 | 2436521 | 2436522 | Yes |
| rs3819532 | chr12 | 2436836 | 2436837 | Yes |
| rs3819535 | chr12 | 2436883 | 2436884 | Yes |
| rs3819537 | chr12 | 6193095 | 6193096 | No |
| rs3825369 | chr12 | 3109640 | 3109641 | No |
| rs3851333 | chr2 | 45545406 | 45545407 | No |
| rs3858698 | chr12 | 2115760 | 2115761 | No |
| rs3858703 | chr12 | 863516 | 863517 | No |
| rs387896 | chr12 | 5795450 | 5795451 | No |
| rs406430 | chr12 | 5753919 | 5753920 | No |
| rs4126711 | chr12 | 2227310 | 2227311 | Yes |
| rs4147666 | chr12 | 4757354 | 4757355 | No |
| rs4147667 | chr12 | 4757392 | 4757393 | No |
| rs4147672 | chr12 | 4764136 | 4764137 | No |
| rs417642 | chr12 | 5763771 | 5763772 | No |
| rs4238022 | chr12 | 5482395 | 5482396 | No |
| rs4238023 | chr12 | 5524561 | 5524562 | No |
| rs4283041 | chr12 | 1637912 | 1637913 | No |
| rs4298967 | chr12 | 2408193 | 2408194 | Yes |
| rs4370987 | chr12 | 2494925 | 2494926 | Yes |
| rs4417359 | chr12 | 6293321 | 6293322 | No |
| rs4437002 | chr2 | 131717890 | 131717891 | No |
| rs4441076 | chr12 | 2502057 | 2502058 | Yes |
| rs444834 | chr12 | 5756794 | 5756795 | No |
| rs445467 | chr12 | 5756322 | 5756323 | No |
| rs4477507 | chr12 | 4373927 | 4373928 | No |
| rs4530408 | chr2 | 131693108 | 131693109 | No |
| rs453385 | chr12 | 5759608 | 5759609 | No |
| rs454704 | chr12 | 5758661 | 5758662 | No |
| rs454736 | chr12 | 5758619 | 5758620 | No |
| rs4631963 | chr12 | 4966213 | 4966214 | No |
| rs4764487 | chr12 | 6332837 | 6332838 | No |
| rs4764519 | chr12 | 5937957 | 5937958 | No |
| rs4764589 | chr12 | 6532281 | 6532282 | No |
| rs4764605 | chr12 | 6623388 | 6623389 | No |
| rs4765670 | chr12 | 2313125 | 2313126 | Yes |
| rs4765676 | chr12 | 2489313 | 2489314 | Yes |
| rs4765680 | chr12 | 2557098 | 2557099 | Yes |
| rs4765743 | chr12 | 3727524 | 3727525 | No |
| rs4765746 | chr12 | 3729882 | 3729883 | No |
| rs4765747 | chr12 | 3735619 | 3735620 | No |
| rs4765804 | chr12 | 5190351 | 5190352 | No |
| rs4765829 | chr12 | 1720793 | 1720794 | No |
| rs4765830 | chr12 | 1721253 | 1721254 | No |
| rs4765870 | chr12 | 2090875 | 2090876 | No |
| rs4765902 | chr12 | 2312964 | 2312965 | Yes |
| rs4765904 | chr12 | 2332392 | 2332393 | Yes |
| rs4765905 | chr12 | 2349583 | 2349584 | Yes |
| rs4765913 | chr12 | 2419895 | 2419896 | Yes |
| rs4765914 | chr12 | 2420376 | 2420377 | Yes |
| rs4765960 | chr12 | 2667929 | 2667930 | Yes |
| rs4766046 | chr12 | 3222713 | 3222714 | No |
| rs4766096 | chr12 | 3403998 | 3403999 | No |
| rs4766108 | chr12 | 3460878 | 3460879 | No |
| rs4766120 | chr12 | 3555525 | 3555526 | No |
| rs4766156 | chr12 | 3761921 | 3761922 | No |
| rs4766255 | chr12 | 4684230 | 4684231 | No |
| rs4766257 | chr12 | 4689012 | 4689013 | No |
| rs4766312 | chr12 | 5031589 | 5031590 | No |
| rs4766335 | chr12 | 5168848 | 5168849 | No |
| rs482514 | chr12 | 396966 | 396967 | No |
| rs492955 | chr12 | 5241914 | 5241915 | No |
| rs4930739 | chr12 | 5712477 | 5712478 | No |
| rs4930764 | chr12 | 5702444 | 5702445 | No |
| rs4930766 | chr12 | 5712163 | 5712164 | No |
| rs4980804 | chr12 | 261928 | 261929 | No |
| rs4980833 | chr12 | 632239 | 632240 | No |
| rs4980836 | chr12 | 675440 | 675441 | No |
| rs4980877 | chr12 | 418915 | 418916 | No |
| rs4980885 | chr12 | 442619 | 442620 | No |
| rs4980968 | chr12 | 883177 | 883178 | No |
| rs4980976 | chr12 | 232703 | 232704 | No |
| rs524468 | chr12 | 371785 | 371786 | No |
| rs529446 | chr12 | 5221318 | 5221319 | No |
| rs550011 | chr12 | 5240225 | 5240226 | No |
| rs555044 | chr12 | 335921 | 335922 | No |
| rs564292 | chr12 | 5235861 | 5235862 | No |
| rs576159 | chr12 | 382875 | 382876 | No |
| rs579526 | chr12 | 373119 | 373120 | No |
| rs611652 | chr12 | 5239768 | 5239769 | No |
| rs614616 | chr12 | 3365072 | 3365073 | No |
| rs622513 | chr12 | 4071237 | 4071238 | No |
| rs6430431 | chr2 | 131684662 | 131684663 | No |
| rs6430441 | chr2 | 131695641 | 131695642 | No |
| rs6489338 | chr12 | 2060579 | 2060580 | No |
| rs6489341 | chr12 | 2104467 | 2104468 | No |
| rs6489353 | chr12 | 2338857 | 2338858 | Yes |
| rs6489367 | chr12 | 2475675 | 2475676 | Yes |
| rs6489375 | chr12 | 2777767 | 2777768 | Yes |
| rs6489439 | chr12 | 3227202 | 3227203 | No |
| rs6489454 | chr12 | 475793 | 475794 | No |
| rs6489482 | chr12 | 3709764 | 3709765 | No |
| rs6489500 | chr12 | 3993627 | 3993628 | No |
| rs6489501 | chr12 | 3993808 | 3993809 | No |
| rs6489568 | chr12 | 4930099 | 4930100 | No |
| rs6489589 | chr12 | 5100436 | 5100437 | No |
| rs6489630 | chr12 | 5604623 | 5604624 | No |
| rs6489662 | chr12 | 726014 | 726015 | No |
| rs6489746 | chr12 | 865969 | 865970 | No |
| rs6547780 | chr2 | 88811786 | 88811787 | No |
| rs6547781 | chr2 | 88831690 | 88831691 | No |
| rs6718310 | chr2 | 131688178 | 131688179 | No |
| rs6718816 | chr2 | 131688586 | 131688587 | No |
| rs7131705 | chr12 | 2186579 | 2186580 | Yes |
| rs7132154 | chr12 | 2461222 | 2461223 | Yes |
| rs7132763 | chr12 | 487334 | 487335 | No |
| rs7133350 | chr12 | 3743474 | 3743475 | No |
| rs7134353 | chr12 | 425501 | 425502 | No |
| rs7134570 | chr12 | 1202357 | 1202358 | No |
| rs7135976 | chr12 | 6186115 | 6186116 | No |
| rs7137113 | chr12 | 3226697 | 3226698 | No |
| rs7137875 | chr12 | 3697838 | 3697839 | No |
| rs7138047 | chr12 | 5418537 | 5418538 | No |
| rs714775 | chr12 | 6619401 | 6619402 | No |
| rs715230 | chr12 | 461597 | 461598 | No |
| rs717596 | chr12 | 3841342 | 3841343 | No |
| rs720721 | chr12 | 2667743 | 2667744 | Yes |
| rs721159 | chr12 | 1948976 | 1948977 | No |
| rs724709 | chr12 | 898399 | 898400 | No |
| rs7294326 | chr12 | 594173 | 594174 | No |
| rs7295590 | chr12 | 2442788 | 2442789 | Yes |
| rs7295704 | chr12 | 884888 | 884889 | No |
| rs7296925 | chr12 | 3715460 | 3715461 | No |
| rs7297582 | chr12 | 2355805 | 2355806 | Yes |
| rs7297784 | chr12 | 5143053 | 5143054 | No |
| rs7297853 | chr12 | 3751045 | 3751046 | No |
| rs7298053 | chr12 | 6619053 | 6619054 | No |
| rs7298357 | chr12 | 6000125 | 6000126 | No |
| rs7298570 | chr12 | 6581481 | 6581482 | No |
| rs7298766 | chr12 | 661655 | 661656 | No |
| rs7300043 | chr12 | 3958712 | 3958713 | No |
| rs7300338 | chr12 | 4139899 | 4139900 | No |
| rs7300444 | chr12 | 993929 | 993930 | No |
| rs7301134 | chr12 | 3508718 | 3508719 | No |
| rs7301422 | chr12 | 447750 | 447751 | No |
| rs7302743 | chr12 | 2269587 | 2269588 | Yes |
| rs7303991 | chr12 | 1956289 | 1956290 | No |
| rs7304949 | chr12 | 4609624 | 4609625 | No |
| rs7304958 | chr12 | 3225938 | 3225939 | No |
| rs7305265 | chr12 | 2032112 | 2032113 | No |
| rs7305676 | chr12 | 5706126 | 5706127 | No |
| rs7307214 | chr12 | 3851048 | 3851049 | No |
| rs7308641 | chr12 | 4667909 | 4667910 | No |
| rs7309847 | chr12 | 3841651 | 3841652 | No |
| rs7312402 | chr12 | 4755516 | 4755517 | No |
| rs7314661 | chr12 | 779905 | 779906 | No |
| rs7314691 | chr12 | 661980 | 661981 | No |
| rs7315460 | chr12 | 5235996 | 5235997 | No |
| rs7315852 | chr12 | 417632 | 417633 | No |
| rs7316135 | chr12 | 1718073 | 1718074 | No |
| rs7342306 | chr12 | 6291092 | 6291093 | No |
| rs735295 | chr12 | 547682 | 547683 | No |
| rs740355 | chr12 | 1723227 | 1723228 | No |
| rs740416 | chr12 | 2499891 | 2499892 | Yes |
| rs740417 | chr12 | 2499848 | 2499849 | Yes |
| rs740458 | chr12 | 1989413 | 1989414 | No |
| rs740897 | chr12 | 5441266 | 5441267 | No |
| rs740898 | chr12 | 5441311 | 5441312 | No |
| rs740901 | chr12 | 5444139 | 5444140 | No |
| rs7485896 | chr12 | 5938445 | 5938446 | No |
| rs7486388 | chr12 | 5766337 | 5766338 | No |
| rs7488279 | chr12 | 5568219 | 5568220 | No |
| rs7488316 | chr12 | 5606371 | 5606372 | No |
| rs753076 | chr12 | 2499167 | 2499168 | Yes |
| rs7579148 | chr2 | 131706882 | 131706883 | No |
| rs758162 | chr12 | 1966288 | 1966289 | No |
| rs758170 | chr12 | 2361459 | 2361460 | Yes |
| rs758173 | chr12 | 2315227 | 2315228 | Yes |
| rs758174 | chr12 | 2315705 | 2315706 | Yes |
| rs758563 | chr12 | 2737058 | 2737059 | Yes |
| rs758739 | chr12 | 6626368 | 6626369 | No |
| rs758798 | chr12 | 5441540 | 5441541 | No |
| rs7595875 | chr2 | 88817091 | 88817092 | No |
| rs763385 | chr12 | 2087044 | 2087045 | No |
| rs763580 | chr12 | 6193536 | 6193537 | No |
| rs7645622 | chr3 | 145887758 | 145887759 | No |
| rs764614 | chr12 | 430651 | 430652 | No |
| rs765124 | chr12 | 2156144 | 2156145 | No |
| rs765125 | chr12 | 2156206 | 2156207 | No |
| rs765891 | chr12 | 966992 | 966993 | No |
| rs769087 | chr12 | 2344643 | 2344644 | Yes |
| rs7953137 | chr12 | 486832 | 486833 | No |
| rs7954351 | chr12 | 6163704 | 6163705 | No |
| rs7954694 | chr12 | 3989666 | 3989667 | No |
| rs7955352 | chr12 | 4946014 | 4946015 | No |
| rs7957013 | chr12 | 3425576 | 3425577 | No |
| rs7957545 | chr12 | 2324041 | 2324042 | Yes |
| rs7958182 | chr12 | 4768436 | 4768437 | No |
| rs7961089 | chr12 | 2463053 | 2463054 | Yes |
| rs7961557 | chr12 | 2493590 | 2493591 | Yes |
| rs7961826 | chr12 | 4973358 | 4973359 | No |
| rs7963651 | chr12 | 4297830 | 4297831 | No |
| rs7965755 | chr12 | 4669739 | 4669740 | No |
| rs7966355 | chr12 | 2075651 | 2075652 | No |
| rs7967032 | chr12 | 2046098 | 2046099 | No |
| rs7968633 | chr12 | 2734449 | 2734450 | Yes |
| rs7968680 | chr12 | 2500202 | 2500203 | Yes |
| rs7968928 | chr12 | 5411035 | 5411036 | No |
| rs7969171 | chr12 | 1679783 | 1679784 | No |
| rs7969761 | chr12 | 355841 | 355842 | No |
| rs7970204 | chr12 | 3429755 | 3429756 | No |
| rs7972490 | chr12 | 1009055 | 1009056 | No |
| rs7972545 | chr12 | 3840771 | 3840772 | No |
| rs7972667 | chr12 | 863832 | 863833 | No |
| rs7972920 | chr12 | 4768618 | 4768619 | No |
| rs7975360 | chr12 | 6605154 | 6605155 | No |
| rs7976678 | chr12 | 6537543 | 6537544 | No |
| rs7976964 | chr12 | 887925 | 887926 | No |
| rs7977039 | chr12 | 2615133 | 2615134 | Yes |
| rs797765 | chr12 | 372437 | 372438 | No |
| rs7978349 | chr12 | 3694487 | 3694488 | No |
| rs7978411 | chr12 | 5415849 | 5415850 | No |
| rs7978603 | chr12 | 6598072 | 6598073 | No |
| rs7979389 | chr12 | 2441461 | 2441462 | Yes |
| rs7980163 | chr12 | 955507 | 955508 | No |
| rs8181786 | chr12 | 2019321 | 2019322 | No |
| rs82602 | chr12 | 2760002 | 2760003 | Yes |
| rs867167 | chr12 | 5259442 | 5259443 | No |
| rs876503 | chr12 | 2797178 | 2797179 | Yes |
| rs877478 | chr12 | 229946 | 229947 | No |
| rs880342 | chr12 | 2481606 | 2481607 | Yes |
| rs882194 | chr12 | 2350451 | 2350452 | Yes |
| rs882195 | chr12 | 2350400 | 2350401 | Yes |
| rs886540 | chr12 | 1590757 | 1590758 | No |
| rs886541 | chr12 | 1590898 | 1590899 | No |
| rs886898 | chr12 | 2481935 | 2481936 | Yes |
| rs886941 | chr12 | 2026914 | 2026915 | No |
| rs887357 | chr12 | 3474644 | 3474645 | No |
| rs917367 | chr12 | 1967525 | 1967526 | No |
| rs917668 | chr12 | 5452772 | 5452773 | No |
| rs936577 | chr12 | 5263803 | 5263804 | No |
| rs959940 | chr3 | 65148430 | 65148431 | No |
| rs959941 | chr3 | 65148831 | 65148832 | No |
| rs9651889 | chr12 | 257059 | 257060 | No |
| rs9669580 | chr12 | 5811468 | 5811469 | No |
| rs979878 | chr12 | 4757473 | 4757474 | No |

SNP IDs listed in the above table correspond to the Reference SNP (refSNP) Cluster Report No. of the NCBI dbSNP database located at http://www.ncbi.nlm.nih.gov/snp. dbSNP is a database of single nucleotide polymorphisms (SNPs) and multiple small-scale variations

[0042] In exemplary aspects, the method further comprises administering a therapeutic compound other than a CCB, such as a mood stabilizer. As used herein, the term “mood stabilizer” refers to a psychiatric medication used to treat mood disorders. The mood stabilizer may be include, but are not limited to, Lithium, Valproic acid, Lamotrigine, Carbamazepine, Divalproex sodium, Sodium valproate, Lithium carbonate, Lithium hydroxidelithium. In exemplary aspects, the mood disorder is an anticonvulsant or an atypical antipsychotic.

[0043] In exemplary aspects, the method comprises sample preparation steps. DNA can be extracted from whole blood or saliva sample obtained from the subject. Genotyping can be performed on the DNA using PsychChip or TaqMan method, or other methods known in the art, to determine the subject's genotype, including for the allele [A] of CACNA1C, wherein allele [A] comprises the sequence of polymorphic marker rs1006737.

[0044] For example, in some aspects, the method comprises selecting a specific cell population from the sample obtained from the subject. The selection step may be carried out by any means known in the art, including, but not limited to FACS or chromatography. In order to assess gene expression level, e.g., RNA levels or protein levels, in neuronal cells, fibroblast cells can be obtained from the subject and used to construct induced pluripotent stem cells (iPSCs). Then, iPSCs can be induced into neuronal cells in culture. Methods for obtaining iPSCs and inducing them to become neuronal cells in culture are known in the art. Gene expression of CACNA1C can be assessed in the cultured neuronal cells using methods of detecting RNA or protein that are known and used routinely in the art and described herein. In exemplary aspects, wherein RNA expression levels are measured, the method may further comprise a step to extract or isolate the RNA from the cells of the sample.

[0045] Any and all possible combinations of the steps described herein are contemplated for purposes of the inventive methods

[0046] Mood Disorders

[0047] As used herein, the term “mood disorder” refers to a mental disorder wherein a disturbance in a subject's mood is thought to be the main underlying feature. Mood disorders are classified in the Diagnostic and Statistical Manual(s) of Mental Disorders, DSM-IV and DSM5. In exemplary embodiments, the mood disorder is a depressive disorder, including, but not limited to, atypical depression, melancholic depression, psychotic major depression, catatonic depression, postpartum depression, seasonal affective disorder, dysthymia, double depression, depressive disorder not otherwise specified, depressive personality disorder, recurrent brief depression, and mino depressive disorder. In exemplary embodiments, the mood disorder is a bipolar disorder (BD). In exemplary aspects, the bipolar disorder is mania, hypomania, bipolar I, bipolar II, cyclothymia, or biopolar disorder not otherwise specified.

[0048] Samples

[0049] With regard to the methods disclosed herein, in exemplary embodiments, the sample obtained from the subject comprises a bodily fluid, including, but not limited to, blood, plasma, serum, lymph, breast milk, saliva, mucous, semen, vaginal secretions, cellular extracts, inflammatory fluids, cerebrospinal fluid, feces, vitreous humor, or urine obtained from the subject. In some aspects, the sample is a composite panel of at least two of the foregoing samples. In exemplary aspects, the sample comprises DNA obtained from one or more blood cells of the subject. In exemplary aspects, the sample comprises DNA obtained from saliva of the subject. In exemplary aspects, the sample comprises brain or neuronal cells from the subject. In exemplary aspects, the sample contains neuronal cells derived from iPSCs induced from fibroblasts collected from the subject. In exemplary aspects, the sample comprises RNA from neuronal cells derived from such iPSCs.

[0050] Subjects

[0051] With regard to the methods disclosed herein, the subject in exemplary aspects is a mammal, preferably a human. In exemplary aspects, the subject is an adult. In exemplary aspects, the subject is a female. In exemplary aspects, the subject is a male. In exemplary aspects, the subject is a subject with a mood disorder. In exemplary aspects, the mood disorder is any of those mentioned herein. In exemplary aspects, the subject is one who suffers from a bipolar disorder. In exemplary aspects, the subject has been treated with a CCB. In exemplary aspects, the subject has not been treated with a CCB.

[0052] Calcium Channel Blockers

[0053] As used herein, the term “Calcium Channel Blocker” or CCB″ refers to any compound, e.g., any drug, that blocks the action of a calcium channel. In exemplary embodiments, the CCB is selected from the group consisting of: amlodipine, diltiazem, felodipine, isradipine, nicardipine, nifedipine, nisoldipine and verapamil. In exemplary aspects, the calcium channel blocker is nicardipine.

[0054] Formulations and Routes of Administration

[0055] With regard to the administration of a therapeutic agent, e.g., a CCB, the agent may be administered through any suitable means, compositions and routes known in the art.

[0056] Kits

[0057] The invention further provides kits which in exemplary embodiments are useful in the methods described herein. In exemplary embodiments, the kit comprises one or more binding agents to the CACNA1C gene or a gene product thereof. In exemplary aspects, the binding agent is a nucleic acid molecule which is about 5, about 10, about 15, about 20, about 25, about 30, about 35, about 40, about 45 or about 50 nucleotides in length. In exemplary aspects, the nucleic acid molecule is about 15 to about 30 nucleotides in length or about 20 to 30 nucleotides in length or about 25 to 30 nucleotides in length. In exemplary aspects, the nucleic acid molecule is about 25 nucleotides in length.

[0058] In exemplary aspects, the binding agent, e.g., the nucleic acid molecule, is conjugated to a detectable label. The detectable label, in exemplary aspects, is a radioisotope, a fluorophore, or an element particle.

[0059] In exemplary embodiments, the binding agent is a nucleic acid molecule, e.g., a nucleic acid probe, which specifically binds to the CACNA1C gene or a gene product thereof. In exemplary embodiments, the nucleic acid molecule hybridizes to or specifically binds to SEQ ID NO: 1, and in exemplary aspects, the nucleic acid molecule hybridizes to or specifically binds to a region of SEQ ID NO: 1 which is about 20 basepairs (bp) to about 1000 bp (e.g., about 30 bp, about 40 bp, about 50 bp, about 60 bp, about 70 bp, about 80 bp, about 90 bp, about 100 bp, about 200 bp, about 300 bp, about 400 bp, about 500 bp, about 600 bp, about 700 bp, about 800 bp, about 900 bp, about 1000 bp) upstream or downstream of position 270344 of SEQ ID NO: 1, which is the polymorphic site of rs1006737. In exemplary aspects, the nucleic acid molecule hybridizes to or specifically binds to a region of SEQ ID NO: 1 which is about 50 bp to about 500 bp upstream or downstream of position 270344 of SEQ ID NO: 1. In exemplary aspects, the nucleic acid molecule hybridizes to or specifically binds to a region of SEQ ID NO: 1 which is about 50 bp to about 400 bp upstream or downstream of position 270344 of SEQ ID NO: 1. In exemplary aspects, the nucleic acid molecule hybridizes to or specifically binds to a region of SEQ ID NO: 1 which is about 50 bp to about 300 bp upstream or downstream of position 270344 of SEQ ID NO: 1. In exemplary aspects, the nucleic acid molecule hybridizes to or specifically binds to a region of SEQ ID NO: 1 which is about 50 bp to about 200 bp upstream or downstream of position 270344 of SEQ ID NO: 1. In exemplary aspects, the nucleic acid molecule hybridizes to or specifically binds to a region of SEQ ID NO: 1 which is about 50 bp to about 100 bp upstream or downstream of position 270344 of SEQ ID NO: 1. In exemplary aspects, the nucleic acid molecule hybridizes to or specifically binds to a region of SEQ ID NO: 1 which is about 100 bp to about 500 bp upstream or downstream of position 270344 of SEQ ID NO: 1. In exemplary aspects, the nucleic acid molecule hybridizes to or specifically binds to a region of SEQ ID NO: 1 which is about 200 bp to about 500 bp upstream or downstream of position 270344 of SEQ ID NO: 1. In exemplary aspects, the nucleic acid molecule hybridizes to or specifically binds to a region of SEQ ID NO: 1 which is about 300 bp to about 500 bp upstream or downstream of position 270344 of SEQ ID NO: 1. In exemplary aspects, the nucleic acid molecule hybridizes to or specifically binds to a region of SEQ ID NO: 1 which is about 400 bp to about 500 bp upstream or downstream of position 270344 of SEQ ID NO: 1.

[0060] In exemplary aspects, the kit comprises a pair of primers suitable for, e.g., amplification of a region of the CACNA1C gene of a given sample. In exemplary aspects, the pair comprises two nucleic acid molecules which work together to amplify (e.g., via a polymerase chain reaction (PCR)) a region of the CACNA1C gene. In exemplary aspects, at least one primer of the pair is a nucleic acid described above.

[0061] In exemplary aspects, the binding agent is a set of oligonucleotides that specifically bind to the CACNA1C gene, and flank the sequence comprising position 2282 of SEQ ID NO: 2. In exemplary aspects, the kit comprises a primer pair, wherein the forward primer is CCACTTGGCTCTATCAAAGTCT and the reverse primer is CCTGAGAGACACTGTGAGGT (SEQ ID NO: 50 and 51, respectively). In exemplary aspects, the kit comprises the primer pairs attached to a solid support. In exemplary aspects, the solid support is a multi-well plate and the primer pairs are attached to a well of the multi-well plate.

[0062] In exemplary aspects, the nucleic acid molecule, primer and/or probe of the kit comprises one or more non-naturally-occurring nucleotides and/or non-naturally-occurring internucleotide linkages (e.g., phosphoroamidate linkages, phosphorothioate linkages). In exemplary aspects, the nucleic acid molecule, primer and/or probe of the kit comprises at least one non-naturally-occurring nucleotide and/or non-naturally-occurring internucleotide linkage. In exemplary aspects, the nucleic acid molecule, primer and/or probe of the kit comprises one or more modified nucleotides, including, but not limited to, 5-fluorouracil, 5-bromouracil, 5-chlorouracil, 5-iodouracil, hypoxanthine, xanthine, 4-acetylcytosine, 5-(carboxyhydroxymethyl)uracil, 5-carboxymethylaminomethyl-2-thiouridine, 5-carboxymethylaminomethyluracil, dihydrouracil, beta-D-galactosylqueuosine, inosine, N⁶-isopentenyladenine, 1-methylguanine, 1-methylinosine, 2,2-dimethylguanine, 2-methyladenine, 2-methylguanine, 3-methylcytosine, 5-methylcytosine, N -substituted adenine, 7-methylguanine, 5-methylammomethyluracil, 5-methoxyaminomethyl-2-thiouracil, beta-D-mannosylqueuosine, 5′-methoxycarboxymethyluracil, 5-methoxyuracil, 2-methylthio-N⁶-isopentenyladenine, uracil-5-oxyacetic acid (v), wybutoxosine, pseudouracil, queuosine, 2-thiocytosine, 5-methyl-2-thiouracil, 2-thiouracil, 4-thiouracil, 5-methyluracil, uracil-5-oxyacetic acid methylester, 3-(3-amino-3-N-2-carboxypropyl)uracil, and 2,6-diaminopurine.

[0063] In exemplary aspects, the nucleic acid molecule, primer and/or probe of the kit comprises non-naturally-occurring nucleotides which differ from naturally occurring nucleotides by comprising a chemical group in place of the phosphate group. In exemplary aspects, the nucleic acid molecule, primer and/or probe of the kit comprises or is a methylphosphonate oligonucleotide, which are noncharged oligomers in which a non-bridging oxygen atom, e.g., alpha oxygen of the phosphate, is replaced by a methyl group. In exemplary aspects, the nucleic acid molecule, primer and/or probe of the kit comprises or is a phosphorothioate, wherein at least one of the non-bridging oxygen atom, e.g., alpha oxygen of the phosphate, is replaced by a sulfur. In exemplary aspects, the nucleic acid molecule, primer and/or probe of the kit comprises or is a boranophosphate olignucleotide, wherein at least one of the non-bridging oxygen atom, e.g., alpha oxygen of the phosphate, is replaced by —BH₃.

[0064] In exemplary aspects, the nucleic acid molecule, primer and/or probe of the kit comprises at least one non-naturally-occurring nucleotide which differs from naturally occurring nucleotides by comprising a ring structure other than ribose or 2-deoxyribose. In exemplary aspects, the nucleic acid molecule, primer and/or probe of the kit is an analog comprising a replacement of the hydroxyl at the 2′-position of ribose with an O-alkyl group, e.g., —O—CH₃, —OCH₂CH₃. In exemplary aspects, the nucleic acid molecule, primer and/or probe of the kit comprises a modified ribonucleotide wherein the 2′ hydroxyl of ribose is modified to methoxy (OMe) or methoxy-ethyl (MOE) group. In exemplary aspects, the nucleic acid molecule, primer and/or probe of the kit comprises a modified ribonucleotide wherein the 2′ hydroxyl of ribose is replaced with allyl, amino, azido, halo, thio, O-allyl, O—C₁-C₁₀ alkyl, O—C₁-C₁₀ substituted alkyl, O—C₁-C₁₀ alkoxy, O—C₁-C₁₀ substituted alkoxy, OCF₃, O(CH₂)₂SCH₃, O(CH₂)₂—O—N(R¹)(R²), or O(CH₂)—C(═O)—N(R¹)(R²), wherein each of R¹ and R² is independently selected from the group consisting of H, an amino protecting group or substituted or unsubstituted C₁-C₁₀ alkyl. In exemplary aspects, the antisense nucleic acid analog comprises a modified ribonucleotide wherein the 2′ hydroxyl of ribose is replaced with 2′F, SH, CN, OCN, CF₃, O-alkyl, S-Alkyl, N(R¹)alkyl, O-alkenyl, S-alkenyl, or N(R¹)-alkenyl, O-alkynyl, S-alkynyl, N(R¹)-alkynyl, O-alkylenyl, O-Alkyl, alknyyl, alkaryl, aralkyl, O-alkaryl, or O-aralkyl. In exemplary aspects, the nucleic acid molecule, primer and/or probe of the kit is an analog comprising a replacement of the hydrogen at the 2′-position of ribose with halo, e.g., F. In exemplary aspects, the antisense nucleic acid analog comprises a fluorine derivative nucleic acid.

[0065] In exemplary aspects, the nucleic acid molecule, primer and/or probe of the kit comprises a substituted ring. In exemplary aspects, the nucleic acid molecule, primer and/or probe of the kit is or comprises a hexitol nucleic acid. In exemplary aspects, the nucleic acid molecule, primer and/or probe of the kit is or comprises a nucleotide with a bicyclic or tricyclic sugar moiety. In exemplary aspects, the bicyclic sugar moiety comprises a bridge between the 4′ and 2′ furanose ring atoms. Examplary moieties include, but are not limited to: —[C(Rₐ)(R_{b})]ₙ—, —[C(Rₐ)(R_{b})]ₙ-0-, —C(RₐR_{b})-N(R)-0- or, —C(RₐR_{b})-0-N(R)—; 4′-CH₂-2′,4′-(CH₂)₂-2′,4′- (CH₂)₃-2′,4′-(CH₂)-0-2′ (LNA); 4′-(CH₂)—S-2′; 4′-(CH₂)₂-0-2′ (ENA); 4′-CH(CH₃)-0-2′ (cEt) and 4′- CH(CH₂OCH₃)-0-2′,4′-C(CH₃)(CH₃)-0-2′,4′-CH₂—N(OCH₃)-2′,4′-CH₂-0-N(CH₃)-2′4′-CH₂-0-N(R)-2′, and 4′-CH₂—N(R)-0-2′-, wherein each R is, independently, H, a protecting group, or C₁C₁₂ alkyl; 4′-CH₂—N(R)-0-2′, wherein R is H, C1-C12 alkyl, or a protecting group, 4′-CH₂—C(H)(CH₃)-2′,4′-CH₂—C(═CH₂)-2′. Such molecules are known in the art. See, e.g., International Application Publication No. WO 2008/154401, U.S. Pat. No. 7,399,845, International Application Publication No. WO2009/006478, International Application Publication No. WO2008/150729, U.S. Application Publication No. US2004/0171570, U.S. Pat. No. 7,427,672, and Chattopadhyaya, et al, J. Org. Chem., 2009, 74, 118-134). In exemplary aspects, the the nucleic acid molecule, primer and/or probe of the kit comprises a nucleoside comprising a bicyclic sugar moiety, or a bicyclic nucleoside (BNA). In exemplary aspects, the nucleic acid molecule, primer and/or probe of the kit comprises a BNA selected from the group consisting of: α-L-Methyleneoxy (4′-CH₂-0-2′) BNA, Aminooxy (4′-CH₂-0-N(R)-2′) BNA, β-D-Methyleneoxy (4′-CH₂-0-2′) BNA, Ethyleneoxy (4′-(CH₂)₂-0-2′) BNA, methylene-amino (4′-CH2-N(R)-2′) BNA, methyl carbocyclic (4′-CH₂—CH(CH₃)-2′) BNA, Methyl(methyleneoxy) (4′-CH(CH₃)-0-2′) BNA (also known as constrained ethyl or cEt), methylene-thio (4′-CH₂-S-2′) BNA, Oxyamino (4′-CH₂—N(R)-0-2′) BNA, and propylene carbocyclic (4′-(CH₂)₃-2′) BNA. Such BNAs are described in the art. See, e.g., International Patent Publication No. WO 2014/071078.

[0066] In exemplary aspects, the nucleic acid molecule, primer and/or probe of the kit comprises a modified backbone. In exemplary aspects, the nucleic acid molecule, primer and/or probe of the kit is or comprises a peptide nucleic acid (PNA) containing an uncharged flexible polyamide backbone comprising repeating N-(2-aminoethyl)glycine units to which the nucleobases are attached via methylene carbonyl linkers. In exemplary aspects, the nucleic acid molecule, primer and/or probe of the kit comprises a backbone substitution. In exemplary aspects, the nucleic acid molecule, primer and/or probe of the kit is or comprises an N3′→P5′ phosphoramidate, which results from the replacement of the oxygen at the 3′ position on ribose by an amine group. Such nucleic acid analogs are further described in Dias and Stein, Molec Cancer Ther 1: 347-355 (2002). In exemplary aspects, the nucleic acid molecule, primer and/or probe of the kit comprises a nucleotide comprising a conformational lock. In exemplary aspects, the nucleic acid molecule, primer and/or probe of the kit is or comprises a locked nucleic acid.

[0067] In exemplary aspects, the nucleic acid molecule, primer and/or probe of the kit comprises a 6-membered morpholine ring, in place of the ribose or 2-deoxyribose ring found in RNA or DNA. In exemplary aspects, the nucleic acid molecule, primer and/or probe of the kit comprises non-ionic phophorodiamidate intersubunit linkages in place of anionic phophodiester linkages found in RNA and DNA. In exemplary aspects, the nucleic acid molecule, primer and/or probe of the kit comprises nucleobases (e.g., adenine (A), cytosine (C), guanine (G), thymine, thymine (T), uracil (U)) found in RNA and DNA. In exemplary aspects, the nucleic acid molecule, primer and/or probe of the kit is a Morpholino oligomer comprising a polymer of subunits, each subunit of which comprises a 6-membered morpholine ring and a nucleobase (e.g., A, C, G, T, U), wherein the units are linked via non-ionic phophorodiamidate intersubunit linkages. For purposes herein, when referring to the sequence of a Morpholino oligomer, the conventional single-letter nucleobase codes (e.g., A, C, G, T, U) are used to refer to the nucleobase attached to the morpholine ring.

[0068] In exemplary aspects, the kit comprises reagents for measuring the expression level of the CACNA1C gene. For example, antibodies that bind to the CACNA1C protein CAᵥ1.2 may be included in the kit of the invention. The antibody may be any type of immunoglobulin, fragment of an immunoglobulin, or nonantibody scaffold known in the art. In exemplary embodiments, the antibody is an antibody of isotype IgA, IgD, IgE, IgG, or IgM. Also, the antibody in some embodiments is a monoclonal antibody. In other embodiments, the antibody is a polyclonal antibody. In some embodiments, the antibody is a naturally-occurring antibody, e.g., an antibody isolated and/or purified from a mammal, or produced by a hybridoma generated from a mammalian cell. Methods of producing antibodies are well known in the art. In some embodiments, the antibody is a genetically-engineered antibody, e.g., a single chain antibody, a humanized antibody, a chimeric antibody, a CDR-grafted antibody, a humaneered antibody, a bispecific antibody, a trispecific antibody, a recombinant antibody, and the like. Genetic engineering techniques also provide the ability to make fully human antibodies in a non-human source. In some aspects, the antibody is in polymeric, oligomeric, or multimeric form. In certain embodiments in which the antibody comprises two or more distinct antigen binding regions fragments, the antibody is considered bispecific, trispecific, or multi-specific, or bivalent, trivalent, or multivalent, depending on the number of distinct epitopes that are recognized and bound by the antibody.

[0069] In some aspects of the invention, the binding agent is an antigen binding fragment of an antibody. The antigen binding fragment (also referred to herein as “antigen binding portion”) may be an antigen binding fragment of any of the antibodies described herein. The antigen binding fragment can be any part of an antibody that has at least one antigen binding site, including, but not limited to, Fab, F(ab′)₂, dsFv, sFv, scFvs, diabodies, triabodies, bis-scFvs, fragments expressed by a Fab expression library, domain antibodies, VhH domains, V-NAR domains, VH domains, VL domains, and the like.

[0070] In exemplary aspects, the kit comprises a CCB, including but not limited to any of the CCBs described herein. In exemplary aspects, the kit comprises a container suitable for holding a sample obtained from the subject. In exemplary aspects, the kit comprises a vial, a tube, a microtiter plate, a dish, a flask, or the like. In exemplary aspects, the kit comprises reagents suitable for isolating DNA, RNA or proteins from the sample.

[0071] In exemplary aspects, the nonantibody scaffold is a nanobody, affibody, affilin, anticalin (lipocalin), fynomer, Kunitz variant, fibronectin type III (FN3) domain (monobody, and related binding protein systems using the FN3 domain), ankyrin repeat (DARPin), disulfide-constrained peptide, or other nonantibody scaffolds.

[0072] Computer Related Inventions

[0073] Related systems, e.g., computer systems, comprising a processor; a memory device coupled to the processor, and machine readable instructions stored on the memory device, are provided herein. In exemplary embodiments, the system comprises machine readable instructions that, when executed by the processor, cause the processor to: (a) receive a data value, α, that is a copy number determination of allele [A] of CACNA1C, wherein allele [A] comprises the sequence of polymorphic marker rs1006737, in the cells of a sample obtained from a subject; and (b) display an output relating to treating the subject for a mood disorder with a calcium channel blocker (CCB), when a is less than the diploid copy number of 2.

[0074] Related computer-readable storage media are also provided herein. In exemplary aspects, a computer-readable storage medium having stored thereon machine-readable instructions executable by a processor is provided. In exemplary aspects, the machine-readable instructions comprise: (a) instructions for receiving a data value, a, relating to the copy number of allele [A] of CACNA1C , wherein allele [A] comprises the sequence of the polymorphic marker rs1006737, in the cells of a sample obtained from a subject; and (b) instructions for displaying an output relating to treating the subject for a mood disorder with a calcium channel blocker (CCB), when a is less than the diploid copy number of 2.

[0075] Related methods implemented by a processor in a computer are provided herein. In exemplary embodiments, the method comprises (a) receiving a data value, α, relating to the copy number of allele [A] of CACNA1C, wherein allele [A] comprises the sequence of the polymorphic marker rs1006737, in the cells of a sample obtained from a subject; and (b) displaying an output relating to treating the subject for a mood disorder with a calcium channel blocker (CCB), when α is less than the diploid copy number of 2.

[0076] The following examples further illustrate the disclosure but, of course, should not be construed as in any way limiting its scope.

### EXAMPLES

### Example 1

[0077] This example demonstrates that an intronic SNP within the CACNA1C gene is a cis-expression quantitative trait locus for CACNA1C. This example also demonstrates that the risk allele is associated with decreased expression of this gene.

[0078] Abstract

[0079] Timothy Syndrome (TS) is caused by very rare exonic mutations of the CACNA1C gene that produce delayed inactivation of Cav1.2voltage-gated calcium channels during cellular action potentials, with greatly increased influx of calcium into the activated cells. The major clinical feature of this syndrome is a long QT interval that results in cardiac arrhythmias. However, TS also includes cognitive impairment, autism, and major developmental delays in many of the patients. We observed the appearance of Bipolar Disorder (BD) in a patient with a previously reported case of TS, who is one of the very few patients to survive childhood. This is most interesting because the common SNP most highly associated with BD is rs1006737, which we show here is a cis-expression quantitative trait locus (eQTL) for CACNA1C in human cerebellum, and the risk allele (A) is associated with decreased expression. To combine the CACNA1C perturbations in the presence of BD in this patient and in patients with the common CACNA1C SNP risk allele, we would propose that either increase or decrease in calcium influx in excitable cells can be associated with BD. In treatment of BD with calcium channel blocking drugs (CCBs), we would predict better response in patients without the risk allele, because they have increased CACNA1C expression.

[0080] Case Summary

[0081] The patient is a European-American male with TS Type 2 (see below) diagnosed in childhood. At age 28, the patient was referred for research evaluation after diagnosis of BD by one of us (FO). This was confirmed by interview with the patient and his mother, using the Diagnostic Interview for Genetic Studies (DIGS), version 3.0.

[0082] The patient was born full-term in good health, and had an uneventful history during his first three years. At age 4, he suffered a cardiac arrest during a trampoline class^{1,5}. Diagnostic work-up identified long QT syndrome, with a QT interval of 550-600 ms. In molecular investigation of his case and one other, TS was described as a severe variant of TS, as discussed below¹ (See FIG. 2).

[0083] No neurological sequelae were observed after this episode of cardiac arrest. He later had other arrests, and a cardiac pacemaker was implanted when he was 8 years old. He suffered his most complicated arrest at age 10, which led to a prolonged hospitalization complicated by liver failure, coma, and anoxic brain injury. After this illness, he received an implanted cardioverter-defibrillator (ICD).

[0084] His cognitive abilities declined after this episode. He became more socially withdrawn and began attending special education classes with full-time aides. He showed left hemiparesis, which persisted, although not severely. He completed high school and worked for one year as a cleaner at a gym. He has never had a seizure.

[0085] At age 19, he had his first episode of major depression, and at 21 he had an episode of mania. Shortly afterwards⁶, TS was described as a mutation in the voltage-gated calcium channel gene CACNA1C. A molecular diagnosis was made when he was 22, and he was treated with a calcium channel blocker (CCB) verapamil at 250 mg/d, which continues to the present time. Theoretically, this would counteract the effects of his mutation, which causes increased Ca⁺⁺ cellular influx during its extended activation⁵. He had a marked decrease in the number of ventricular fibrillation episodes, but no change in QT interval, and continued to have some episodes of a trial fibrillation.

[0086] Ten months after starting the medication, he was referred to a neurologist, who found depression and prescribed citalopram. The patient then had significant improvement in mood and behavior.

[0087] By age 30 he had experienced 10 manic episodes and 3 hypomanic episodes. These were characterized by periods of up to two weeks duration when his sleep decreased markedly, and he would become aggressive with his siblings and would start fights and verbal altercations that were a departure from his usual behavior. Restlessness, talkativeness and difficult-to-follow speech were also present. Ability to focus was impaired. At age 27, the most extreme manic episode occurred, when, along with the usual symptoms, there were hallucinations and paranoid delusions.

[0088] Lithium was then given for mood stabilization, but was not well tolerated, with complaints of increased lethargy and irritability. He was restarted on his antidepressant and has been stable for the three years of observation since then. We note that this is not a typical course of BD, and that further observation will be needed to fully define his course.

[0089] Timothy Syndrome (TS) Molecular Pathophysiology

[0090] TS is caused by missense mutations in the CACNA1C gene, which encodes the alpha-1 subunit of the L-type calcium channel Caᵥ1.2. All these mutations occur in one of the pore-forming S6 trans-membrane helix segments of the protein. The G406R mutation in exon 8A causes TS1⁶, while TS2 is produced by one of two mutations in the alternate splice form exon 8, G406R or G402S (as in this patient)¹, and a recently reported mutation in exon 38 causes TS3⁷. Our patient is the only known living carrier of the exon 8 G402S mutation, for which he is a mosaic¹. We confirmed his reported mutation by sequencing in our own lab (data not shown).

[0091] It is still not completely clear how TS mutations lead to altered function of CaV1.2 channels, but it is known that multiple aspects of channel function are affected. Voltage-dependent inactivation is decreased⁸, action potentials are longer, and calcium flux through Cav1.2 channels is increased⁹⁻¹¹. It is also not known how the delayed inactivation leads to long QT intervals, ventricular fibrillation, or any of the neurological traits associated with the syndrome. In neuronal induced pluripotent stem cells (iPSCs) derived from TS patients, there are multiple changes in gene expression, including increased tyrosine hydroxylase (TH) activity and increased production of norepinephrine and dopamine¹². These changes are most likely related to the role of calcium influx as a second messenger indirectly regulating transcription. Conceivably, these changes in catecholamines are related to the observed arrhythmias and neuropsychiatric changes.

[0092] The L-type channel blocker nimodipine failed to reverse excess expression of TH in these neuronal cells¹². However, treatment of the cells with roscovitine, an experimental drug in cancer treatment that inhibits cyclin-dependent kinases and also blocks the calcium channel, specifically enhanced (normalized) inactivation of the L-type channel of the Cav1.2 protein¹³, and caused a 68% reduction in the proportion of TH-positive neurons.

[0093] CACNA1C Knockout Mice Cardiac Effects

[0094] Two studies of transgenic mice with knockout (KO) of CACNA1C reported opposite effects on heart function. Rosati et al.'s heterozygous KO mouse showed a 58% reduction of CACNA1C mRNA and a 21% reduction in CACNA1C protein, but no change in L-type calcium channel (LTCC) current or in gross cardiac phenotype¹⁴. The Goonasekera study¹⁵ had a graded knockdown heterozygote with cardiac protein levels of CACNA1C reduced by approximately 40%, and roughly 25% less whole-cell LTCC current measured in freshly isolated adult ventricular myocytes. These mice had a pronounced cardiac stress-induced phenotype, but the effects of verapamil were actually detrimental to cardiac function, despite a reduced LTCC current¹⁵. The differences are difficult to resolve. Both studies had a KO cassette maintained on a C57BL/6 background, but there were some differences in the cassette construction. Another mouse study, in which LTCC activity was increased by over-expressing the β2a subunit of the LTCC, found that increased LTCC activity produced a phenotype similar to that of the Goonasekera, leading to cardiac hypertrophy and early death¹⁶. This suggests that it may be a perturbation in calcium influx, rather than specifically an increase or decrease, that leads to a disease phenotype in the mouse models.

[0095] CAC1NAC in Bipolar Disorder

[0096] The marker most significantly associated with BD in a recent meta-analysis of genome-wide association studies is an intronic SNP within CACNA1C, rs1006737¹⁷. Although the variant with biological effect is not necessarily the associated SNP, it must be in LD with the functional variant, so the biology of the associated SNP is of some interest. One of us (CL) is leading an ongoing study of expression Quantitative Trait Loci (eQTLs) in brain, using the Stanley Medical Research Institute postmortem brain collections. For the current paper, we tested rs1006737 for association with CACNA1C expression levels in human brain tissue.

[0097] Materials and Methods for CACNA1C Expression Study

[0098] Samples

[0099] In our ongoing study, we obtained 164 cerebellum and parietal cortex brain samples from two collections of the Stanley Medical Research Institute (SMRI)¹⁸⁻²⁰. We used the Norgen DNA purification kit to extract high molecular weight DNA from tissue blocks. The DNA was resuspended in low EDTA TE buffer. The DNA concentration and A260/A280 ratio were determined on a NanoDrop ND-1000 spectrophotometer (NanoDrop Technologies, Wilmington, Del.). Only intact DNA samples showing a major band at approximately 10-20 kb on a 1% agarose gel were genotyped.

[0100] RNA Preparation and QC

[0101] We used the RN easy Mini kit (Qiagen, Valencia, Calif.) to extract total RNA from brain tissue blocks. The ratio of 28S to 18S rRNA and RNA Integrity Number (RIN) were measured using an RNA LabChip kit on the Agilent 2100 Bioanalyzer (Agilent Technologies, Santa Clara, Calif.). To avoid use of seriously degraded samples, only RNA samples with a RIN>7 were used for expression profiling.

[0102] Genotyping was performed using Affymetrix GeneChip Mapping 500K Array at TGen by Dr. David Craig (www.tgen.org). Genotypes were called using the BRLMM-p algorithm (Affymetrix). SNPs with call rates ≧99%, Hardy-Weinberg equilibrium (HWE) p values≧0.001 and minor allele frequencies (MAF)≧10% were included in the association tests. Pairwise identity-by-state was calculated using PLINK to verify unrelatedness. We used MACH (http://www.sph.umich.edu/csg/abecasis/MACH/index.html) to impute 852,963 SNPs.

[0103] Gene expression profiling was performed using Affymetrix's GeneChip Human Gene 1.0 ST Array, by the NIH Neuroscience Microarray Consortium at Yale University. Raw data in CEL files were summarized by Affymetrix Expression Console software EC1.1, using our customized library files to remove probes that have cross-hybridization to multiple genomic regions, or contain common SNPs. Batch effects were removed by ComBat²¹. All covariates were removed by SVA²² before the SNP-expression association tests.

[0104] SNP-expression association tests were performed for cis-regulation. Cis-association refers to correlation of genes and SNPs within 1 Mb of before or after those genes. We used mach2qtl to perform the association tests, and permutation correction. Permutation was used to correct for multiple testing: region-wide significance corrected for the number of SNPs tested; phenotype-wide significance corrected for the number of phenotypes tested as well. No trans-associations (with SNPs outside this region) were found with CACNA1C.

[0105] Results of CACNA1C Expression Study

[0106] We detect a significant cis-association of CACNA1C expression in cerebellum for SNP rs1006737 that survives correction for region-wide multiple tests, where the risk allele (A) is associated with reduced expression (Table 1). The association is present in multiple exons as well as transcripts of this gene in cerebellum but not in parietal cortex (see Table 2). This finding is also present for rs1024582, the CACNA1C SNP recently associated by Smoller et al.³ with multiple psychiatric disorders. rs1024582 is in nearly complete LD with rs1006737 (R²=0.94), and its risk allele (A) is also associated with significantly decreased cerebellar expression of the same CACNA1C probes (data not shown).

TABLE 1
Association of SNP rs1006737 bipolar risk allele (A) with
decreased expression of CACNA1C in human cerebellum

| Probe | Probe | Frequency | | | | |
|---|---|---|---|---|---|---|
| type | ID | (A allele) | Effect | CHISQ | P-value | Corr_p |
| exon | 7953041 | 0.36 | −0.47 | 14.67 | 1.28E−04 | 0.026 |
| exon | 7953044 | 0.36 | −0.52 | 17.65 | 2.66E−05 | 0.006 |
| exon | 7953049 | 0.36 | −0.61 | 24.46 | 7.59E−07 | 0.001 |
| exon | 7953050 | 0.36 | −0.52 | 17.67 | 2.63E−05 | 0.004 |
| exon | 7953066 | 0.36 | −0.54 | 19.73 | 8.91E−06 | 0.004 |
| exon | 7953068 | 0.36 | −0.55 | 20.18 | 7.04E−06 | 0.002 |
| exon | 7953075 | 0.36 | −0.61 | 24.50 | 7.43E−07 | 0.001 |
| exon | 7953076 | 0.36 | −0.52 | 17.73 | 2.54E−05 | 0.004 |
| exon | 7953079 | 0.36 | −0.50 | 16.30 | 5.41E−05 | 0.014 |
| exon | 7953081 | 0.36 | −0.49 | 16.10 | 6.00E−05 | 0.026 |
| exon | 7953093 | 0.36 | −0.67 | 29.47 | 5.67E−08 | 0.001 |
| exon | 7953095 | 0.36 | −0.55 | 19.84 | 8.43E−06 | 0.004 |
| tran- | 7953040 | 0.36 | −0.60 | 23.73 | 1.11E−06 | 0.001 |
| script | | | | | | |
| tran- | 7953094 | 0.36 | −0.46 | 14.28 | 1.58E−04 | 0.048 |
| script | | | | | | |

Notes:
EFFECT: Beta regression coefficient of expression on SNP after correcting for covariates; CHISQ: Test statistic; P-value for test statistic; Corr_p: regionwide-corrected p-value. Computation by MACHqtl (http://www.sph.umich.edu/csg/abecasis/MACH/download/).

TABLE 2
No association of Bipolar SNP rs1006737 risk allele (A)
with expression of CACNA1C in human parietal cortex

| Probe | Probe | Frequency | | | | |
|---|---|---|---|---|---|---|
| type | ID | (A allele) | Effect | CHISQ | P-value | Corr_p |
| exon | 7953041 | 0.36 | 0.08 | 0.48 | 0.49 | 1 |
| exon | 7953044 | 0.36 | −0.04 | 0.15 | 0.71 | 1 |
| exon | 7953049 | 0.36 | −0.02 | 0.03 | 0.89 | 1 |
| exon | 7953050 | 0.36 | 0.03 | 0.07 | 0.80 | 1 |
| exon | 7953066 | 0.36 | 0.09 | 0.57 | 0.45 | 1 |
| exon | 7953068 | 0.36 | 0.16 | 1.95 | 0.16 | 1 |
| exon | 7953075 | 0.36 | 0.03 | 0.08 | 0.77 | 1 |
| exon | 7953076 | 0.36 | 0.32 | 8.07 | 0.01 | 1 |
| exon | 7953079 | 0.36 | 0.06 | 0.31 | 0.58 | 1 |
| exon | 7953081 | 0.36 | 0.05 | 0.19 | 0.66 | 1 |
| exon | 7953093 | 0.36 | 0.05 | 0.21 | 0.64 | 1 |
| exon | 7953095 | 0.36 | 0.23 | 4.08 | 0.04 | 1 |
| tran- | 7953040 | 0.36 | 0.21 | 3.46 | 0.06 | 1 |
| script | | | | | | |
| tran- | 7953094 | 0.36 | 0.06 | 0.27 | 0.60 | 1 |
| script | | | | | | |

Notes:
The Bipolar disorder risk allele is the minor allele (A), but the analysis program reports on the major allele (G); EFFECT: Beta regression coefficient of expression on SNP after correcting for covariates; CHISQ: Test statistic; P-value for test statistic; Corr_p: regionwide-corrected p-value

[0107] Discussion

[0108] Cerebellum and Psychiatric Disorders

[0109] In a landmark review in 2005, Konarski et al.²³ advanced the paradigm-shifting hypothesis that, based on functional associations evident through cerebellar stimulation, lesions, and functional and morphometric imaging, cerebellar abnormalities play a crucial role in several psychiatric disorders, including schizophrenia, depression, and bipolar disorder. In a 2008 review, Andreasen and Pierson²⁴ remark that “The tentorium was once the Maginot Line of the brain. Supratentorial regions governed “higher cortical functions,” while the humble subtentorial cerebellum performed “lower” functions unrelated to cognition.” They then summarize evidence cortical circuitry connecting the cerebellum and cortex, and conclude that through its role modulating cognition the cerebellum appears to play a crucial role in Schizophrenia. More recent evidence showed, and changes in gene expression of NMDA receptor subunits in cerebellum in Schizophrenia²⁵, and differential expression of genes encoding neuronal ion-channel subunits in cerebellum in several psychiatric disorders including bipolar disorder²⁶. In a whole-genome expression analysis, Chen et al.²⁷ demonstrated two gene co-expression modules associated with Bipolar Disorder and Schizophrenia in multiple data sets. One of the modules was associated with these diagnoses in both cerebral cortex and cerebellum. This module included metallothioneins (MT) and metal binding site functions, which are involved in oxidative stress and other cellular processes. In a related finding, myelination and oxidative stress alterations were observed in the cerebellum of the G72/G30 transgenic schizophrenia mouse model²⁸. In view of all these findings, we would conclude that it is no longer valid to consider the cerebellum as a brain region that cannot play a decisive role in a mental disorder.

[0110] Role of Common SNPs in Brain Expression of CACNA1C

[0111] It is logical to test for an association between the CACNA1C SNP rs1006737 genotype and CACNA1C expression levels, given the strength and scope of the associations between that SNP and risks of multiple psychiatric diseases, as well as numerous behavioral and cognitive endophenotypes. We report such an association in human cerebellum, but not in parietal cortex. These findings have not yet been replicated in a second dataset; while similar genotype-expression datasets exist, they differ from the current data in multiple ways (See Table 3 for summary). In particular, none included parietal cortex and only one included cerebellum.

TABLE 3
Brain eQTL data: brain regions covered by gene expression and SNP microarrays in different studies

| | | | Gene | | | |
|---|---|---|---|---|---|---|
| | | Brain | expression | | | |
| Authors | N | regions | microarray* | SNP genotype microarray | CB results | PC results |
| Gibbs JR et al.²² | 150 | CB, FC, | GSE15745, | HumanHap550 beadchips, | n.s. | n/a |
| | | PONS, TC | Illumina | 2,545,178 SNPs imputed | | |
| | | | Human Ref-8 | | | |
| | | | v2.0 Expression | | | |
| | | | BeadChip | | | |
| Colantuoni C et | 269 | PFC | GSE30272, | Illumina Infinium II 650K | n/a | n/a |
| al.²⁵ (Bigos et | | | Illumina | or Illumina Infinium HD | | |
| al.²⁴ reported on | | | Human 49K | Gemini 1M Duo | | |
| a subset of data | | | Oligo Array | BeadChips | | |
| from this study). | | | | | | |
| Kang HJ et al.²³ | 57 | 16 brain | GSE25219, | Illumina Omni-2.5 Array | n/a | n/a |
| | | regions | Affymetrix | | | |
| | | | GeneChip | | | |
| | | | Human Exon | | | |
| | | | 1.0 ST Array | | | |
| Liu C et al. (this | 130-150 | PC, CB | Affymetrix | Affymetrix Genome-Wide | rs1006737 associated with | n.s. |
| study) | | | GeneChip | Human SNP Array 500K, | down-regulation of | |
| | | | Human Gene | 852,963 SNPs imputed. | CACNA1C expression | |
| | | | 1.0 ST Array | | | |

Brain regions: PFC prefrontal cortex, PC parietal cortex, CB cerebellum, FC frontal cortex, PFC prefrontal cortex, PONS pons, TC temporal cortex.
*The Affymetrix GeneChip Human Gene 1.0 ST Array probe sets 7953049 and 7953050 are near exons 8 and 8a. Illumina's HumanRef-8 BeadChip has one CACNA1C probe, ILMN_1666775, which maps to a region 187 Kb away from exon 8 and 8a. Illumina's Human 49K Oligo Array has probe HEEBO-098-HCA98N4 near exon 8a. In BrainCloud, the corresponding probe is labeled as 37564. The Affymetrix GeneChip Human Exon 1.0 has two probe sets, 3400806 and 3400807, near exon 8 and 8a.

[0112] For the CACNA1C, there is reason to expect different results from different brain regions, because there are differences in relative expression of L-type calcium channels across brain regions. In a mouse model, Schlick et al. found that the ratio of CaV1.2 to CaV1.3 expression was about 1:1 in cortex and hippocampus, while in cerebellum it was 4:1²⁹. Detection of expression differences in CaV 1.2 may thus be more feasible in cerebellum than in cortical regions.

[0113] The genome-wide mapping of brain expression and methylation QTLS by Gibbs et al.³⁰ is the one comparable study that included cerebellum. They reported no association between CACNA1C expression and rs1006737 genotype in cerebellum or in the other three regions tested. However, the Illumina expression platform they used had one probe for all of CACNA1C. Our study and Kang et al.'s³¹ QTL mapping of human brain both used an Affymetrix platform with much better CACNA1C coverage. The increased number of probes and regions studied dramatically increased the multiple testing burden in the Kang study, which, combined with the Kang study's small sample size (N=57), left it with low statistical power. None of the probes studied met their criteria for statistical significance of association of SNPs with a gene (gene- wide Bonferroni correction followed by genome-wide Q<0.1) in any of the 16 brain regions they tested, which did not include cerebellum or parietal cortex.

[0114] Bigos et al.³² studied the association between CACNA1C genotype and expression in dorsolateral prefrontal cortex, with data that are also included in a later and broader publication by the same group³³. Using another SNP rs2159100 as proxy for rs1006737, since the two are in complete LD (R²=1.0), they reported that that the risk allele is associated with increased CACNA1C expression as measured by probe 28032. To review the group's findings, we used BrainCloud (http://braincloud.jhmi.edu/) to retrieve their cis-eQTL data for CACNA1C. There were actually six expression probes for this gene. Two (28032, 36147) showed nominally significant association with rs2159100 (P=0.022 and 0.028 respectively), with the risk allele (A) having increased expression relative to the non-risk allele. However, the expression probe near exon 8a (37564) and the other three probes were not even nominally associated with rs2159100 genotype. In addition, when the Bonferroni correction for multiple testing is applied (0.05/6 tests=0.008), none of the probes reach gene-wide signficance.

[0115] BD in Timothy Syndrome

[0116] TS includes a range of neurological, cognitive and psychiatric symptoms, including autism^{1,6,34}, and it would appear from this case that BD is one of them. A possible “confluence of rare/uncommon and common genetic variation on the same genetic [disease] loci” has been noted in GWASs³⁵, which would fit variations in CACNA1C associated with BD. However, we must consider other possibilities: the patient's anoxic brain injury might be considered as an alternative causes. Also, if his symptoms are due to a gain-of-function calcium channel defect, verapamil might be expected to have prevented or treated this defect, as it partially did in his cardiovascular system. Third, BD is a common disease, and could occur in the same patient independently of a rare disease.

[0117] Mania can arise after traumatic brain injury (TBI), but has only rarely been reported after anoxic brain injury³⁶. Jorge et al. found a 9.1% incidence of mania after TBI within the first 12 months in 66 patients; but there is little data showing association of mania with a very long interval after head injury, such as the 11 years in this case^{37,38}. Most experts conclude that the longer the latency, the more the attribution of mania to the TBI may be questioned.

[0118] If the patient's CACNA1C mutation is responsible for his BD, one might expect that verapamil would also have prevented or treated that condition, as it succeeded in treating his heart condition. However, as noted above, verapamil does not correct the depolarization deficit in TS, or change the intracellular neurotransmitter abnormalities of TS in iPSC cells.¹² Also, the doses used for the management of cardiac conditions are lower than those needed to attain effects in the brain ³⁹, because verapamil has low penetration into the brain, particularly in males

[0119] Implications for BD

[0120] If the same disease is produced by the TS gain-of-function CACNA1C mutation (increased Ca⁺⁺ flux) as is associated with the common CACNA1C BD risk polymorphism, and there is loss of function from the risk allele of the common polymorphism (decreased Ca⁺⁺ flux from reduced gene expression), this would suggest that Ca⁺⁺ flux that strays in either direction from normal can produce deficits in CNS function in humans, possibly as a result of changes in monoamine neurotransmitter synthesis and release. Our own human brain data, with the largest number of CANA1C expression probes so far examined, demonstrates that individuals with the common polymorphic risk allele have decreased CACNA1C expression in at least one brain region (Table 1). These patients may have a degree of decreased Ca⁺⁺flux due to haploin sufficency, by analogy with the CACNA1C heterozygous graded KO mice of Goonasekera.¹⁵

[0121] This would suggest that efficacy of CCB treatment in BD patients would differ in patients with and without the risk allele. Because the CACNA1C risk allele is expected to produce loss of calcium channel function, we would expect BD patients without the risk allele to preferentially respond to CCB treatment. A 2000 review of treatment studies of CCBs in BD⁴¹ concluded that CCBs had not been adequately evaluated as a BD treatment, but evidence that they were generally effective was not present. The reviewed trials had treated BD patients as a single population, but now patient groups can be subdivided according to CACNA1C genotype.

[0122] There is already evidence that CACNA1C genotype can affect response to CCBs in treatment of hypertension^{42,43}. A CCB medication which has less of a blood-brain gradient than verapamil, and which, like roscovitine, succeeds in reversing the TH abnormality in TS iPSC cells might be the preferred choice for a clinical trial.

[0123] These data indicate that patients with bipolar disorder who do not have the risk allele have increased CACNA1C expression, relative to patients with bipolar disorder who have one or two copies of the risk allele. Accordingly, these data indicate that patients with bipolar disorder who do not have the risk allele respond better to treatment with calcium channel blocking drugs.

### Example 2

[0124] This example demonstrates a clinical study on the use of calcium channel blockers (CCB) as an augmentation therapy for patients with mania (including schizoaffective manic patients).

[0125] Response to CCB as an augmentation therapy is tested in a series of 90 patients (total for three collaborating centers). Bipolar I or Schizoaffective-manic patients between ages 18 and 50, who are not currently treated with a CCB, do not have a medical contraindication to CCB treatment, and are currently manic and hospitalized, are treated with CCB as an add-on to Treatment As Usual (TAU). Each patient is followed until mania ratings have subsided to <4 on YMRS or two weeks have passed. At the end of the study of 90 patients, genome-wide association genotyping is performed on all patients, and calcium channel gene polymorphisms are tested for correlation with clinical response to CCB treatment.

[0126] Patients for the study are selected as follows:

[0127] Clinical evaluation: At the time of hospital admission or as soon as possible afterward, the patient is invited to consent to the study. They then have a baseline examination to confirm the diagnosis of acute mania, and to obtain a medication history. This includes a clinical examination, review of medical records and treatment history, and interview with relatives and any significant other person who may know the patient's history.

[0128] Mania is diagnosed by satisfying DSM-V criteria for a manic epdisode (DSM-V Bipolar I description), Young Mania Rating Scale [7] (YMRS) score >15, and lifetime history of at least one previous episode of mania (based on medical records or history provided by a reliable source).

[0129] The criteria for excluding an individual from the study are as follows:
[0130] 1) Unwilling or unable to comply with study requirements.
[0131] 2) History of CCB-related toxicity or hypersensitivity.
[0132] 3) Currently treated with a CCB.
[0133] 3) Previous cardiac surgery. Previous diagnosis of certain cardiac (heart) or vascular disorders, including cardiac arrhythmia (heart rhythm problem), atherosclerosis (blockage of blood vessels), congestive heart failure, myocardial infarction, angina, cerebrovascular disease.
[0134] 4) High blood pressure, renal failure.
[0135] 5) Clinically significant hypotension (low blood pressure)
[0136] 6) Women who are pregnant, breastfeeding, or of child-bearing potential and aren't able to agree to medically acceptable contraception.
[0137] 7) Currently active substance abuse or dependence.

[0138] The following treatment protocol is followed:

[0139] Prior to entering the treatment protocol, each participant receives an EKG and comprehensive metabolic panel. Patients with evidence of clinically significant abnormalities in cardiac, hepatic, or renal function, based on these tests or other clinical examination, are excluded.

[0140] Treatment as Usual: The guidelines for treatment as usual (TAU) are well accepted [8], and indicate that the foundation of treatment as usual is to maintain treatment with at least one FDA approved mood stabilizer (including Lithium, certain anticonvulsants, and certain atypical antipsychotics) and to follow the recommendations summarized in the evidence-based stages of Texas Implementation of Medication Algorithm (TIMA) revised guidelines. For all patients in this protocol, TAU requires the presence of at least one FDA-approved mood stabilizer and antidepressant medications are only prescribed in combination with a mood stabilizing drug, as described in the TIMA guidelines.

[0141] All participants receive TAU for manic episode bipolar or schizoaffective disorder [8] either provided by the principal investigator or by co-investigator clinical psychiatrists or psychiatry residents trained and supervised in optimal treatment practices for bipolar disorder within inpatient hospital settings.

[0142] CCB treatment: Nicardipine satisfactorily crosses the blood-brain barrier, and has a long history of clinical use for cardiac arrhythmias, hypertension, and Reynaud phenomenon. The initial dosage is 20 mg po three times daily (60 mg per day). After 3 days, re-evaluation of dosage is made. If clinical state of mania has not improved, and there is not significant reduction in resting and standing blood pressure, dosage is increased to up to 120 mg per day.

[0143] Patient ratings: CGI-S-BP for Mania and for Depression and Young Mania Rating Scale are completed daily by the treating psychiatrist or by a designated collaborating resident or other professionally qualified trained rater.

[0144] Genetic test: The PsychChip under development by Illumina for genome-wide association studies has over 200,000 common SNPs on it, including the CACNA1C risk SNPs and all the SNPs of calcium channel genes that have suggestive association in the literature or have been of interest in psychiatric disorders. All patients with clinical data on their manic episode are genotyped using this PscyhChip.

[0145] Response analysis: The endpoint is either scored on YMRS <4 or 2 weeks in the trial [9]. Survival analysis is performed using the Kaplan-Meier method [10] for the main hypothesis of CACNA1C risk allele. For an exploratory analysis, the Cox proportional hazards model [11] is used, incorporating as covariates all genotypes of Calcium channel genes with p<0.001 in meta-analyes of genome-wide association tests of Bipolar disorder.

[0146] Statistical power: This is a preliminary trial, and we may not have enough data on treatment response to estimate power to discriminate two groups of patients.

[0147] Risks/Benefits: The potential benefit of this protocol is improved treatment of mania, a disorder that can be life-threatening to the patient because of risky behavior and because of manic exhaustion, and is difficult to manage with current medication. Common side effects of nicardipine include headache, peripheral edema, dizziness, flushing, asthenia, angina, hypotension, nausea/vomiting, tachycardia, and palpitations. Serious reactions include angina exacerbation, AV block, myocardial infarction, pericarditis, ventricular tachycardia, deep vein thrombosis, thrombocytopenia, and hypersensitivity reaction. The probability of serious reactions is minimized by not including patients with history of cardiovascular disorder or with abnormal measured risk factors for cardiovascular disorder, such as extreme obesity or abnormal LDL cholesterol. Patients with compromised renal or hepatic function, which can be associated with adverse effects of nicardipine, are excluded from the study.

[0148] Clinical Evaluation Protocol:

[0149] Symptom Severity

[0150] Each day, symptom raters examine patient and review nursing and medical records. Based on all this information, mania is rated using CGI-S-BP for Mania and for Depression, and the Young Mania Rating Scale (implemented in integrated version with CARS-M (see below)). The raters are attending or resident doctors on the inpatient service, nurses, or research assistants.

[0151] Clinical Global Impressions of Severity Scale-Bipolar Version (CGI-BP) [12]. The CGI-BP is a modified version of the original CGI designed specifically for use in assessing global illness severity and/or change in patients with bipolar disorder and assesses overall bipolar illness, depression, and mania. While the original CGI has been criticized for lack of reliability, the CGI-BP has been shown to have excellent inter-rater reliability [12]. Not surprisingly, placebo response rates have been shown to be lower with the CGI-BP, compared to the HAM-D or MADRS in bipolar disorder [13]. In contrast to symptom-severity scales, the CGI-BP is an integrated measure of illness severity. In contrast to the MADRS and HAM-D, it is not encumbered by the inability to distinguish improved somatic function (appetite and sleep) from medication-induced adverse events, which is important when studying medications that cause weight gain or somnolence.

[0152] Young Mania Rating Scale (YMRS). An 11-item, clinician-rated measure that queries symptoms of mania.

[0153] Clinician Administered Rating Scale for Mania (CARS-M) [14]. The CARS-M is a reliable and valid 15 item, clinician rated measure of mania The CARS-M incorporates a number of methodological improvements in comparison to more frequently utilized mania rating scales, such as the YMRS. For example, the CARS-M separately assesses the presence of psychotic symptoms (e.g., delusions and hallucinations). Given the overlap in symptoms assessed on the YMRS and CARS-M, an integrated version will be developed and utilized for the current study, minimizing patient burden, yet allowing full scale scores to be derived for each measure.

[0154] When it is clinically feasible, patients undergo a detailed interview scale (Diagnostic Interview for Genetic Studies (DIGS). Data are collected on course of illness including age of onset for bipolar disorder, number of prior episodes, past treatment response, childhood abuse (emotional, physical, sexual), medical conditions, psychoactive substance use, and family history, prior treatment and prior suicide attempt history, including lethality.

[0155] The following references are cited in the above example.
[0156] 1. Gershon E S, Grennan K, Busnello J, Badner J A, Ovsiew F, Memon S et al.: A rare mutation of CACNA1C in a patient with bipolar disorder, and decreased gene expression associated with a bipolar-associated common SNP of CACNA1C in brain. Mol Psychiatry 19(8):890-4 (2013).
[0157] 2. Caillard V, Masse G: Treatment of mania by a calcium inhibitor. Preliminary study. Encephale 1982, 8: 587-594.
[0158] 3. Casamassima F, Hay A C, Benedetti A, Lattanzi L, Cassano G B, Perlis RH: L-type calcium channels and psychiatric disorders: A brief review. Am J Med Genet B Neuropsychiatr Genet 2010, 153B: 1373-1390.
[0159] 4. Pazzaglia P J, Post R M, Ketter T A, Callahan A M, Marangell L B, Frye M A et al.: Nimodipine monotherapy and carbamazepine augmentation in patients with refractory recurrent affective illness. J Clin Psychopharmacol 1998, 18: 404-413.
[0160] 5. Bachmeier C, Beaulieu-Abdelahad D, Mullan M, Paris D: Selective dihydropyiridine compounds facilitate the clearance of beta-amyloid across the blood-brain barrier. Eur J Pharmacol 2011, 659: 124-129.
[0161] 6. Paris D, Bachmeier C, Patel N, Quadros A, Volmar C H, Laporte V et al.: Selective antihypertensive dihydropyridines lower Abeta accumulation by targeting both the production and the clearance of Abeta across the blood-brain barrier. Mol Med 2011, 17: 149-162.
[0162] 7. Young R C, Biggs J T, Ziegler V E, Meyer D A: A rating scale for mania: reliability, validity and sensitivity. Br J Psychiatry 1978, 133: 429-435.
[0163] 8. Suppes T, Dennehy E B, Hirschfeld R M, Altshuler L L, Bowden C L, Calabrese J R et al.: The Texas implementation of medication algorithms: update to the algorithms for treatment of bipolar I disorder. J Clin Psychiatry 2005, 66: 870-886.
[0164] 9. Berk M, Ng F, Wang W V, Calabrese J R, Mitchell P B, Malhi G S et al.: The empirical redefinition of the psychometric criteria for remission in bipolar disorder. J Affect Disord 2008, 106: 153-158.
[0165] 10. Kaplan E L, Meier P: Nonparametric Estimation from Incomplete Observations. Journal of the American Statistical Association 1958, 53: 457-481.
[0166] 11. Cox D R, Oakes D: Analysis of Survival Data. Chapman & Hall; 1998.
[0167] 12. Spearing M K, Post R M, Leverich G S, Brandt D, Nolen W: Modification of the Clinical Global Impressions (CGI) Scale for use in bipolar illness (BP): the CGI-BP. Psychiatry Res 1997, 73: 159-171.
[0168] 13. Calabrese J R, Bowden C L, Sachs G S, Ascher J A, Monaghan E, Rudd G D: A double-blind placebo-controlled study of lamotrigine monotherapy in outpatients with bipolar I depression. Lamictal 602 Study Group. J Clin Psychiatry 1999, 60: 79-88.
[0169] 14. Altman E G, Hedeker D R, Janicak P G, Peterson J L, Davis J M: The Clinician-Administered Rating Scale for Mania (CARS-M): development, reliability, and validity. Biol Psychiatry 1994, 36: 124-134.

### Example 3

[0170] This example demonstrates the testing of additional SNPs.

[0171] SNPs in Table A are tested for predictive power of response to CCB treatment in patients undergoing the protocol in Example 2, and in other clinical protocols studying treatment response in other affective disorder diagnoses, which are described above in the section entitled “Mood Disorders.”

### Example 4

[0172] This example demonstrates a method of determining a treatment regimen for a subject with a mood disorder.

[0173] DNA is extracted from whole blood of the subject using known methods. Presence of allele [A] is determined by Sanger sequencing, or by microarray methods, or by PscyhChip, or other known DNA polymorphism detection methods. If Sanger sequencing is used, the primers used are: Forward primer: CCACTTGGCTCTATCAAAGTCT (SEQ ID NO: 50) and Reverse primer: CCTGAGAGACACTGTGAGG (SEQ ID NO: 51). This amplifies a fragment of 100 bp, which contains the SNP rs1006737. Sequencing result can determine whether the subject has A or G allele. Subjects that have one or fewer copies of allele [A] of CACNA1C are treated with a calcium channel blocker.

[0174] The following represents a list of references cited in Example 1.

[0175] 1. Splawski I, et al. Severe arrhythmia disorder caused by cardiac L-type calcium channel mutations. Proceedings of the National Academy of Sciences of the United States of America. 2005; 102:8089-8096.

[0176] 2. Ferreira M A, et al. Collaborative genome-wide association analysis supports a role for ANK3 and CACNA1C in bipolar disorder. Nat Genet. 2008

[0177] 3. Cross-Disorder Group of the Psychiatric Genomics Consortium Identification of risk loci with shared effects on five major psychiatric disorders: a genome-wide analysis. Lancet. 2013

[0178] 4. Psychiatric GWAS Consortium Bipolar Disorder Working Group et al. Large-scale genome-wide association analysis of bipolar disorder identifies a new susceptibility locus near ODZ4. Nat Genet. 2011

[0179] 5. Jacobs A, Knight B P, McDonald K T, Burke M C. Verapamil decreases ventricular tachyarrhythmias in a patient with Timothy syndrome (LQT8) Heart Rhythm. 2006; 3:967-970.

[0180] 6. Splawski I, et al. Ca(V)1.2 calcium channel dysfunction causes a multisystem disorder including arrhythmia and autism. Proc Natl Acad Sci USA. 2004; 119:19-31.

[0181] 7. Gillis J, et al. Long Q T, syndactyly, joint contractures, stroke and novel CACNA1C mutation: Expanding the spectrum of Timothy syndrome. Am J Med Genet A. 2012; 158A:182-187.

[0182] 8. Barrett C F, Tsien R W. The Timothy syndrome mutation differentially affects voltage- and calcium-dependent inactivation of CaV1.2 L-type calcium channels. 2008; 105:2157-2162.

[0183] 9. Thiel W H, et al. Proarrhythmic defects in Timothy syndrome require calmodulin kinase II. Circulation. 2008; 118:2225-2234.

[0184] 10. Erxleben C, et al. Cyclosporin and Timothy syndrome increase mode 2 gating of CaV1.2 calcium channels through aberrant phosphorylation of S6 helices. Proceedings of the National Academy of Sciences of the United States of America. 2006; 103:3932-3937.

[0185] 11. Depil K, et al. Timothy mutation disrupts the link between activation and inactivation in Ca(V)1.2 protein. J Biol Chem. 2011; 286:31557-31564.

[0186] 12. Pasca S P, et al. Using iPSC-derived neurons to uncover cellular phenotypes associated with Timothy syndrome. Nat Med. 2011; 17:1657-1662.

[0187] 13. Yarotskyy V, Gao G, Peterson B Z, Elmslie K S. The Timothy syndrome mutation of cardiac CaV1.2 (L-type) channels: multiple altered gating mechanisms and pharmacological restoration of inactivation. J Physiol. 2009; 587:551-565.

[0188] 14. Rosati B, et al. Robust L-type calcium current expression following heterozygous knockout of the Cav1.2 gene in adult mouse heart. J Physiol. 2011; 589:3275-3288.

[0189] 15. Goonasekera S A, et al. Decreased cardiac L-type Ca(2)(+) channel activity induces hypertrophy and heart failure in mice. J Clin Invest. 2012; 122:280-290.

[0190] 16. Nakayama H, et al. Ca2+- and mitochondrial-dependent cardiomyocyte necrosis as a primary mediator of heart failure. J Clin Invest. 2007; 117:2431-2444.

[0191] 17. Liu Y, et al. Meta-analysis of genome-wide association data of bipolar disorder and major depressive disorder. Mol Psychiatry. 2011; 16:2-4.

[0192] 18. Knable M B, Barci B M, Webster M J, Meador-Woodruff J, Torrey E F. Molecular abnormalities of the hippocampus in severe psychiatric illness: postmortem findings from the Stanley Neuropathology Consortium. Mol Psychiatry. 2004; 9544:609-20.

[0193] 19. Torrey E F, Webster M, Knable M, Johnston N, Yolken R H. The stanley foundation brain collection and neuropathology consortium. Schizophr Res. 2000; 44:151-155.

[0194] 20. Torrey E F, et al. Neurochemical markers for schizophrenia, bipolar disorder, and major depression in postmortem brains. Biol Psychiatry. 2005; 57:252-260.

[0195] 21. Johnson W E, Li C, Rabinovic A. Adjusting batch effects in microarray expression data using empirical Bayes methods. Biostatistics. 2007; 8:118-127.

[0196] 22. Leek J T, Storey J D. Capturing heterogeneity in gene expression studies by surrogate variable analysis. PLoS Genet. 2007; 3:1724-1735.

[0197] 23. Konarski J Z, McIntyre R S, Grupp L A, Kennedy S H. Is the cerebellum relevant in the circuitry of neuropsychiatric disorders? J Psychiatry Neurosci. 2005; 30:178-186.

[0198] 24. Andreasen N C, Pierson R. The role of the cerebellum in schizophrenia. Biol Psychiatry. 2008; 64:81-88.

[0199] 25. Schmitt A, et al. Gene expression of NMDA receptor subunits in the cerebellum of elderly patients with schizophrenia. Eur Arch Psychiatry Clin Neurosci. 2010; 260:101-111.

[0200] 26. Smolin B, Karry R, Gal-Ben-Ari S, Ben-Shachar D. Differential expression of genes encoding neuronal ion-channel subunits in major depression, bipolar disorder and schizophrenia: implications for pathophysiology. Int J Neuropsychopharmacol. 2012; 15:869-882.

[0201] 27. Chen C, et al. Two Gene Co-expression Modules Differentiate Psychotics and Controls. Molecular Psychiatry. 2012 Ref Type: In Press.

[0202] 28. Filiou M D, Teplytska L, Otte D M, Zimmer A, Turck C W. Myelination and oxidative stress alterations in the cerebellum of the G72/G30 transgenic schizophrenia mouse model. J Psychiatr Res. 2012; 46:1359-1365.

[0203] 29. Schlick B, Flucher B E, Obermair G J. Voltage-activated calcium channel expression profiles in mouse brain and cultured hippocampal neurons. Neuroscience. 2010; 167:786-798.

[0204] 30. Gibbs J R, et al. Abundant quantitative trait loci exist for DNA methylation and gene expression in human brain. PLoS Genet. 2010; 6:e1000952.

[0205] 31. Kang H J, et al. Spatio-temporal transcriptome of the human brain. Nature. 2011; 478:483-489.

[0206] 32. Bigos K L, et al. Genetic variation in CACNA1C affects brain circuitries related to mental illness. Arch Gen Psychiatry. 2010; 67:939-945.

[0207] 33. Colantuoni C, et al. Temporal dynamics and genetic control of transcription in the human prefrontal cortex. Nature. 2011; 478:519-523.

[0208] 34. Bader P L, et al. Mouse model of Timothy syndrome recapitulates triad of autistic traits. Proceedings of the National Academy of Sciences of the United States of America. 2011; 108:15432-15437.

[0209] 35. Panagiotou O A, Evangelou E, Ioannidis J P. Genome-wide significant associations for variants with minor allele frequency of 5% or less—an overview: A HuGE review. Am J Epidemiol. 2010; 172:869-889.

[0210] 36. Calache M J, Bourgeois M. Bipolar affective disorder and anoxic brain damage. Br J Psychiatry. 1990; 157:458-459.

[0211] 37. Jorge R, Robinson R G. Mood disorders following traumatic brain injury. Int Rev Psychiatry. 2003; 15:317-327.

[0212] 38. Shukla D, Devi B I, Agrawal A. Outcome measures for traumatic brain injury. Clin Neurol Neurosurg. 2011; 113:435-441.

[0213] 39. May A. The importance of the heart in cluster headache treatment. Nat Clin Pract Neurol. 2008;4:182-183.

[0214] 40. van Assema D M, et al. P-glycoprotein function at the blood-brain barrier: effects of age and gender. Mol Imaging Biol. 2012; 14:771-776.

[0215] 41. Levy N A, Janicak P G. Calcium channel antagonists for the treatment of bipolar disorder. Bipolar Disord. 2000; 2:108-119.

[0216] 42. Kamide K, et al. Genetic polymorphisms of L-type calcium channel alpha1C and alpha1D subunit genes are associated with sensitivity to the antihypertensive effects of L-type dihydropyridine calcium-channel blockers. Circ J. 2009; 73:732-740.

[0217] 43. Bremer T, Man A, Kask K, Diamond C. CACNA1C polymorphisms are associated with the efficacy of calcium channel blockers in the treatment of hypertension. Pharmacogenomics. 2006; 7:271-279

[0218] All references, including publications, patent applications, and patents, cited herein are hereby incorporated by reference to the same extent as if each reference were individually and specifically indicated to be incorporated by reference and were set forth in its entirety herein.

[0219] The use of the terms “a” and “an” and “the” and similar referents in the context of describing the invention (especially in the context of the following claims) are to be construed to cover both the singular and the plural, unless otherwise indicated herein or clearly contradicted by context. The terms “comprising,” “having,” “including,” and “containing” are to be construed as open-ended terms (i.e., meaning “including, but not limited to,”) unless otherwise noted.

[0220] Recitation of ranges of values herein are merely intended to serve as a shorthand method of referring individually to each separate value falling within the range and each endpoint, unless otherwise indicated herein, and each separate value and endpoint is incorporated into the specification as if it were individually recited herein.

[0221] All methods described herein can be performed in any suitable order unless otherwise indicated herein or otherwise clearly contradicted by context. The use of any and all examples, or exemplary language (e.g., “such as”) provided herein, is intended merely to better illuminate the invention and does not pose a limitation on the scope of the invention unless otherwise claimed. No language in the specification should be construed as indicating any non-claimed element as essential to the practice of the invention.

[0222] Preferred embodiments of this invention are described herein, including the best mode known to the inventors for carrying out the invention. Variations of those preferred embodiments may become apparent to those of ordinary skill in the art upon reading the foregoing description. The inventors expect skilled artisans to employ such variations as appropriate, and the inventors intend for the invention to be practiced otherwise than as specifically described herein. Accordingly, this invention includes all modifications and equivalents of the subject matter recited in the claims appended hereto as permitted by applicable law. Moreover, any combination of the above-described elements in all possible variations thereof is encompassed by the invention unless otherwise indicated herein or otherwise clearly contradicted by context.

The application's sequence listing, which the Patent Office published only in electronic form, follows.

SEQUENCE LISTING (67 sequences)

SEQ ID NO: 1 - DNA, 734164 bp, Homo sapiens
  ref <308>: DATABASE ACCESSION NUMBER: NCBI / NG_008801.2
  ref <309>: DATABASE ENTRY DATE: 2014-05-04
  ref <313>: RELEVANT RESIDUES IN SEQ ID NO: (1)..(734164)
tcctgttacaaccatattagaaataagcttgcttaggaatttaaaggagaaaaatgagagttgaggtcctgaattcactgactacacaaatgaatctaggataggggtcagcaaatctgtgggccaagtccagcccaccacctgttttttgtaaagaaagtcacaaacacagccaagctcaacacagccatgctcctttgtttacatgttgtttatggctgctttcacattacaagggcagaattctatagtcggaacacaaatcctatggactgcaaagcctaaaatactcactctctggtccctttgagaagagtttgccaactcctcacacagtgcattctaaaggatgctctcattagttgctaaggaaacccaatttagagttctgaaatactgaggaaagaaccccctactttacagactgccttgaagtcaaggcaaggttgattctggcaactcaaatcctgcagctctctggcagtttcaaaacatggtaaagattccattctaactcggagaagaggggccatttaaaaaaccacttagagcaacgaggagttcttctgttgcctggaaaacaatacaaagatagaccagattgctcctatatgctgctaggtgatgtcgaggaaaatatactttccctttatgtgctgtaactttcagctcacattcttattattgccatgaagtttacggtaacaaagatctgagtacttactgagagacttaattctaactggggagggggtcggaatccacacaatcagctgcttattgctagtaaataatcaatttcctgcccgagctgttaggtaattactgcagaatgctgacaattataacatggcctcttggctgagctacagggtattttttaatctgtatgaaatcctgttattattatccactgcacaatttacagtaacatgaatgttctaggaactagttgttatggtggtaaataccagtttgaatacacttaatcaccatctgcaccttgagctagttacctaaaattagctacctctagctagactttcaggaatctatctcatctcttaaaaggtgctccctgtttttcatttccgtgaggtcactttctagtcatttcattgccccaggatttaaaagtggggactgattcttttgcacacagagctacagtgtcatacccatgtggcagcagccatcctatgtgcttggctgagtccagtcccaggctgtgacacagcacgtgcaggaaactcatctcactctgagactcttcccatccccataaatggcagggaaataactgcctcacagtgagcagccctgggctcaaaaattgatcagtcaaccaactgcagagcagagaacaagccctcctctttcaacgcaatcagggaagccaagagtgggaaagtcagacagcaattttaaagttgcccaaaatgcagaatgggacaaatcacaaggtatcataagattaaaagaaagagaccagtaacaaggaagagagagacagtcgactgatcactaagctaatagtaactcagcaatttctaaggagacagaaaataaagactaccttaactcagtgtctgagacatgggaggaaattctgagctcccacaaacatgtatacacagttaaaggaaagcatctgggggatgaaggaaatgaaagattttacagaatcgggagcagacttttaggatggctctgaatgttctttttaccaacaggcatattgataacttttcaaagcaaaaaattgctaatttacatatgaaaatattaaagaaaactgccatctggaacaattcatatatatttcacacacaggaaaaaatgaatcattctagatgataaatattatgcagtgaaactgcggcaagttgttcttacgtctaattttcatttattaattaatactaaatgtctgcctaaccagtgaaaaggactgctatgggagatatattctgttaagactgtagtatagttacacacacttagaaatacaaacaaaagcaccaggtcctgaaaaatatttagccttttagtacttactttttcataagctctgcaattctttggcattcttccttatcataaaaccaaattccatagatggacactgcaaaaaacacacatcaaacaaattatgagcatcttcaaaactacaaaatagaaaaaaatctcctttccatcttaaatacataataatctatgtgttaaattgatttattcaataattattgaataaataaaagcaatcattggggttaaagcttaaaaatacagcatcaagccaggcacagtggctcacacttgtaatcccagtactttgggatcacttgaggtcaagtgttcaagaccagcctggccaacatggtgaaaccccatctctactaaaaatacaaaaaaaattagccaggcctggtggcgggcgtccataatcccagctactcgggatgcagaggcaggagaatcgcttgaacctgggaggtggaggttgctgtgagccaggatcgcgccattggacgccagcctggatgaaaagagggaaactctgtctcaaaaaaaaaaaaaaaagcatcaaaatttaagtccacagagaaatccgtggtggttttgtgcaaagacgcgcacccacacacattgaagaaactgtgctccgcgtgaaaacatggcacctgaacacaacaggcactcggcaaaatcctctgaagcaaatgaatacagacggaaaatgaaatcacaatttctatacttcctggctgcgagatagcattgtttctacactccatttgcacatttcataaacacatttcatgtttatttttaaatattcagaaacctgatactcaaattatgcctagaagcctccctccccttctccttctctcaggaacatgttaactgagaaagtggctttgtaagctgtaagttagggagaggccactggaaaaaataaaatttaataataaacttctggcttcaaaatggtacagaaaatgtataactgctgaaagattagatatgactatgatttcctcatttagtaatgaaagaaactgtgacataatatacctgctattgattcattcaataatgttcaaataagttgtatactttagtatgtgcctatctatatcatttttatagcaaaggctgaagcagctccagaagacatttataaatatctagttgaggatctgatggcattaatcatctaagtaatgcattaactacacacacatttaaaacatcttcactgaaaacagcagcaatattacgatagggcaatgaaaaccaacaaaacatgtttttacaagggaaaaaagactttaaattcaaactttctaaacacgtaattatattaatagtattttgctgttaaaacagctatgatattctaactacatcttttttcccctcttacctgaccaatgtctgggcatggaatttctgcttcttgtcagtaatgattcatatatcaaaaggtacaagaaatgtctttatagtgctattttaagcaggtatcttaaagaggaacctatgaatctgaattactcacttgccaaaaggtggcaatagggctttaaactttggttttgcaattatcagtgtaccagaaatcttttatcttacctacctgcacgtgaagtgggggggaagtaggggaaaaaatcccagcttttccttgaacaggaccattttactctcttagatggaaatacatacacattttcctccttggtacactgacttttttttttttttttttttaagaacgtctgagttctgaagcccatgtgctatgagagcttttacatcaaaacaaaattctttcatctcaagatcattgaatgtgtatcttgaaacttcatattcaaggttgcttccagtccatcaacaataattccctactctaattccctacacagattcctacactaacctgcataccctcacgttcttgaagtcaaagcagattggatcactgacgttcaaccacttaataaatctgagtatgtttgcgtgtcttggtgactttaaccttagttacaaaactaggagcctggcctatttttttggttatagtgtaagttttctttccttgaagactgacttttccaaaactatcaaaggagaaagatggcagtaagggagaaaaacagagcataactcagaaacacgaggcccaatggcagaggaaaaaatggccgttgttgtctcatgaataggctctattaataagaatattctgggtatctttcgtttgatgttatacatttgcggcatttgacataaggaattaggctttcgtaagggtgggatgccaagaaaactgttgatacaaatagaaaagcagtttgacagtgtcatcaccatgagataactgaaatgcagatttagggagcgaaaatgctacggaacatctttcaaatgtcaaagcaaaatgaaggaaagattgagtttgcagtaattatttaagacatcgtgaagacttctttaggacccaaccatttatctccaaagcaacatggctttaaaaattaaaatgagatcattttgagataactcttttgatcccagtttagtctggacagaaaatttaaatagccaaaggggaaaaaaaaaccattaaccaagagttctggctaccgaaaagaggcaccaagataaaatgcagaactgggcctaactttcttctccctaaaatagttttgcaacttgagtgcattcccctgggaaagaggctgtgaattccatggaagtatgcattccaagtttcctgcctcttagccctaaggtctaccaacccctggacaaacctatcactcttccacacaagagggtctatcaaagcagtctgtggagatatataaaaaccagagatcaccatgccttagggaggtgatgagctgacaggctgacagaaaccatgaagttcacatttcaatccaagttttcccgtaaagccactggctgagaggcccatccctacataggcagggagcagagcagggaagacgaaaatacaaggttgaaaagaatcaagtaagaaggtgttttgttttgttttttagaattctaaaacttaaaaggaattttactgtaacttaaacttgcagcgatacgatacggccatgtcaacttttgtggcactgaaatgttactgcaggaatagcttctgggttttaaaaaattataagagatcatgagcaggataattatttagctttaaaaatcaaccaattaatatacatctggaaattcacaatgcttcgagcctttgttcagcctggtacgcctgcataccagccgcttcccagccacctgtctgccaacacggaggtcaagtttaagggtactttggtgcatgaagctcaactcaactatttctacatctctcctggaggtaagaaaccctaaagtgaaataaagagtaggaagaacatgttgaaatttactctaaatatcctaatgatacctagaatgtgacttcctcactctaagaactcatctctccatatttaatcaggatttaccacacaccgttgtaaaattttgcctgtaactgcactatcctggtttatgccgttctttggaaattctcaattgaaaaaaagtgatgtttgaggcaacaggcaatgcaatactgcctttacataatgaaacaccaatcttttactttccttttaactccgtcagtaagatcaaggagatcaaaatttccatatagacttcatgtctggattttttaggtccacaaagacaaggcagagagcaagctgattatattcagtagtggtattttctttttaaatttcttcagtggaaaaaccaaaagctggtcaaattttaagaggctagttaaggggccattaaaggcagtgtcatgtcagcgtcattcaaatgtacattttcatttgtaaccctttgattcttattagcatggtgcattagttcattttgcatgttctttggggatttgccttatctcatttatgttcctaataaatatttctgtttgatctgttcttttaagatatttataatttgttttatatttttacccaaataccatacaactccaaatcatgaatgatagcttgtaatcgtctaatgaggacatgtgataatgtttgtgtaaatttttaaaagaagatatatatccattcaattaggaagtggatgataaacacataattacatgggtaaaatttaaataggcaggacatctgatttggtaatgttctttctaatataacttcactaattcctctcaaaaagacagggaaatatgtttttcttagcattcagcaaggaaggcatttaagttccctctttttacttggaaagccacggaaacgtggtagtgtgacattacacaaacctcttctgggcatctaaggataaaccaaaatttaaaattccttcaaactccactcctttcatgaagtcttcctcacaagagtagaataatattttcaatgtaaggatggagaatatctaatcatatatttgtgtaaacacttgtttctgagacttcattcaaatataatgtttcttgatttactatagcatttatctagatcaagctttaataaatctgaccacattgatgatgactcgttactagcatatggtagtacacatgcacacacagctactaggcatttgaaagatcccaagatatttaaaaaaaacagaaaaatagaaccatgaaattttagagccagaagtcaggtaagaagcatgcagttcaagaacctatttcaccaatgaggaatctgtggtctaacaaggttaaataagctagccaaagtcatttttcttggtttaatctgtttcccctaaaacatgcccttctcccagcctttcaaatgaaatacatgaagcattcaaatttgtttttacatattggattgagttctaggcttggttataaaagactggaattagtctttttaaaccaaagttcatatggactctcaaaaggaaaaaaagaaggatggaatgaagggaggggggagatcagtgaggaagggagggagggagagggagaaaaagagagaaaagaaagaggaagggaattaagctttctggtagtggcagtgttttcacagcagtaaacactcgagcagcaatgacgctgcctgtgtgctggcatccatagatgggaaacacaggctgcgtttggccggctctgtgcggattctgtacttcttccccatttggaatgtttgcactcaaaatgctttcctccggcatgttctctaatgcctttaaagtaatgttcttccattcaccttctgcgttagctttactgaccaaacacggacacaatcttgtaaaacaaaatcttcactggccactgagagtctacatagcactgttatctttggcccctggtctgcttcttttcatatgacatggttttactgcacctcacaaatcagcgatcccatgacctgagaataatggaaggttcaaagcagatgagaagcagtttctattttatgggtgactaatactcatgaacattttgggggaaacagtagaaacaaacctcccctttctaaataaattaatgttattagaaagttaatgccattaaaaacaaacaaaactctctgaattaaagcattatactaatttggattaaattaatatgtactctccaactataaatgagaatttattactttcccagtaaaagacagatttaatcttttagaaagttttaatttataatggattcatgttatatcattcaatcttcctaatcttcccagagatcatcatcttcctaaactgggaaccttgaggtcatctactaccctcaggtttaccaaaggtcatatggaatctttttcatcgtatactaatttcctagttttatttgttcctttaatctaagagatataacagagtaaataaacttttaaaaattaggaagcagaaaagtccatagtttacaacaaatataaatagaaacaacttattctgctttgttggccacttaaatttatattttcatttgttcataatcttgctgaaaaatttcaaaatctccttggccacaaatatcatgcagggagtccctaatacatcttttccttctctctactcgtccttgaagacccaggctttctcactcctctaggaataaacagtcccaactttttctttgctcctgtagttttgtatatccttgtagtaaaaaaggtaataaattaagcatttataaatctgttccctccactagactataagctcctggaggggaggactttgttaaaacacccagtacagcaaacagcatgtgcagacattcaacaaatacttgctgagttgaaatgaaatctaagacttcaagctcttctaccatcaataacccttgtaattgctaatatcaataattatcacttcctggaataattcaacatgtggactagatatgctagaattctctatcaattgattacaccttctaccagaaatttcagcatggacagtctcctcatatcaccgcttttgttctccttcaaccttcactgagagtttattttgcttcaaacactttaccttcttatgcttaagtagtgttgatgggattctgtcattaggatatgagctcccgaagactgtatatttcgattgatccagcactatgtagacactaatgtactcgtttaatgtgtatttactattacaactctaccatataccattcttcctgattgactacttgttaggcactggcaactaagagctcaaaggatgcaacaattctgcaaaatcacatgcatttctcttcattatggaaaaacaaaggacaaataataactaatagtactttggtctaccagaaaatccaagctattcatattctagtcgcgtttgataatggcaatcccaagcttacatatataagcacctgaatgacctgaaaaatgtaagatttagatgcatgtcagtcattccagcaacacactgacaactatcaccataagtgaatctcaatgtacataaataagtccagtctcctataatcgcagtttttgagaaagctatgtttaaacatgtctatttatgcttaagcttatttttaaaacagaatatttctacaggtcaaaaatttgttccaatgaagaacagacttcttcatatttgagccagatgatttaattgagtgtttaacaatgataggaatagctctgctgaaaatagcctaactataaaacacatgatcacagaaatatttctacaatttgacatagcagtagtctagccaaaggagcctagtgctacttcctgattaaagaaaagtcagagtttctttattttttcatttttaccttaatctgtgaatatagacataggagatactactttccaaaagactctttccaaaaaccctttatgtttaaacagttaaattgtgttttggttctactatgaaataagagctctaaggctatacataaggtaattctaatacaagttcttggccaaaattgttttccttcttcaaaacccataatttttccttctgtgggttaagcagtaaatttactttgattccagaacttgattatttgaaactatttactaaatgatttttggacaaaaattagtaatataaaacacagaatctaaaagaatacacattatatagccataatgaccacttactatagataaagggtagggaaactaaaagatgctttccttattaagcatttaagaaaatgttttggaacccagcttttctctgccaagaatttagacttccaccatgctaaactgggctctcttaaacacaaaacataaaatacactgcatgtccaagccacagatgcagcgtatcaatctgaatagcattactatgttttcttggtcaagctgagaaccttaatagtctttatggtttaggataaaacaagtgactttactttgtagcagctgtaaatcaccatatatgactttgccacatgggtttttcctcacctcagcatgtcagattgttaagttacataagaaatgtatatattcacatgaaggttctctccgtgagtcccctggcagttatgatggagaagtagaaactgtgttaattggatggtcagggtgaagagaagggttgtttactcacactgtgtatctgcttatgtgtgtgtttcaaggaactatctggtgtcacaactcaacacacagaaaaatagaaatacgaaatccagagataccacaaggctcaagagtgaaattctgctttacttgagatttttcagagcctttctttagatggatagttttctttagagtttagatcccttcctttcagcctaagtggagtactgacagagaacaaaaaagtcattttggattaaaggtcacagtgacaagtttcatcactcaagtcacagtagacgtataaccctttatcatatattaacatgttagctctctaagcaatggtgcataataaatagatcaatttttcagtcggaatggcaaaggagacttagagacacaaagtaagattcagtgaccacattatgatttttaaattttggtggctcttctttctttctcattaaatgcaggcttaaaaggagtccttgaaagtttctaattcaaccaaccactcctctcacatacagtaaaagagcctcaagactgtataggttacctattctgactaaatatgaaatgtcaaattcctcggctcccattcctcactgctcatgatgtgaatgagtctactttaaggtcttgtcttcctgggcagatcccgaagagaaatgtattctgttattcctgcaaatactaagtttttgcctagtaagaatgtcaagtatttttagccatatagttactttaaatattagtttcttgaccctagagagctttaggggttcaataaaatccctaaaactatatgcaaaatgtcatgtatatatgcaaattttgggaggtgaaaaagtgcaaagcatagaccctctaaaacaatgtctggcacacagcagtcaagcaaatatatttgaggaaagggggagagggagggagggagggggaggaaggaaagtaggaagtaaagaaggaagaaatgaaggaaaaaagggaagaagaaaagtcttcagattctcataggggtttgtgactcacagaagattaggaactactatttgcgactatcaatatgccaataaatatcctagaatggaaaacaaccctcagttatctctgggcagataatgtgtctttcatttacttggtaataaatttacacagagttcacttttaactttccagattgcttttgtaatcactgcctaaactgattgcaaggttaagaaaagacgtaacaaagtctccaagtcttagaatttgttaagttggaagagcttttattcctccatgtagcctgaagcctaggagaaagcttaaaaagcacagatctgttagcatgctcggccatgatgagggtgaatcacacagttcagctgtggctactggtttgccttcgttggagaggtgtcattctccgtctctaccatgaagtgggaaacaggaagacattttggaaagctcgacaactttgtgactcctgcttgatcactccaagcagcgtatcttcaaagctttgtcttatgcattctgatgttccagatgccacacaaaatcatcagatacacatatacacatataacaattctagaatataagtgatttgcgaattttgttaagtacactgtacatgtctatttcttatctaaatctgtttatttcctgtgtttatttggcaccacagaatataagtaaaatataagatatggtctttgcccataaggggcctgtaatttattatccataccactgccttctcaatagcctagataattagcaaccaattaattaatggtaacatagtggcagagaaaacgttttacaaaatgcattctaagtatagtgagcaatattgtttccaaattatgactcatcattgttctctaaatttgactttcttactgctattatttactatgggtatatacaggtacactttaactttggagctttggaagacaatcaagtttatacttcataagatgttctataatagccaccaagaaaatatctactattatatttttaaactgtattgtttttatatgtttcattctagagaaagcactgcagaataatgctaaggctcctctttgctaggaaattgacatttaaaaaaattgactctcaagagagaagtggaaggttaattccttccactcaggaaaaatattaagttatacggtttccatatttttggcaaagagaaatcttgcttctctgaccatggggagaaagcagatgtcgcaacccagagaaagggggcatagccttctcactgatctggaaactagaaatgcagactcaactatttctattacctcacattacttggggctttcagttgacatcaagcttttggtattatgttggtttaaagtactgaagatgtgttttagaacaaggactgctttatttccaggttgaaaaagccaagacgcaaagtaataaagagttagtgtaatattctaaccaacacagcagagatcagggttagcagaaacactggttaataaatgtcaggaaaataaagaagggtaaaaaattatccttaaattttcatttatttaaatacttcttttataaggttcaattatttctactttcttacattgaagaatcatttatgtacaagaaaatgcacagatcttaaagtgttctgctcagtgagttggcaataaaacactcttatgtaaccaacactgaaaacaagatataaaatatttttatcactcttttccagtcaacaaccacaccccacttccaccaccagccccagcagagacaaccaattttttacttctatcaccctagattagttttgcctgttcttcaacttcatataaacttcatataaatggggtcgtacagtatatcctcttttgtagatggcttgctttgctcaacatgtttctgaaattaattcatgttgttgaatatatcagtagttcatttcttcttatcgctgagtagtgttctattattatataccaaaatttgttcatctatgtaactattaatgggtatccaggttattaccagagttttttgctattatgaataaaactgctttgagcatttgtgtaaaagtctttgtgtggacatgtgctttcggagtctcactctgtcacccaggctggagtgcaatggcgcgatcttggctcactgctgcaacctccgcctcccgcgttcaagaaattctcctgcctcaggctcccaagtggctgggattacacgtgcccgccatcgagcctggctaattttttttatttttagtagagatggggtttcgccatgttggccaggctggtctcaaactcctgacctcaggtgatccgcctgcttcggcctcccaaagtgttgggattacaagcgtgagccacagcgcctggattttttgtttgtttgtctttgagacggagtctggcttcatcgcccaggctggagtgcagtggtgccatcttggctcactacaacctccaccttcagggttcaagtgatcctgccttggcctccccagtagctgggatcacaggggcctgccaccatgcctggctaatttttgtatttttagtagagagggggtttcaccatgttggccaggctcgtctcgaactcctgacctcaagtgatccgcccgcctcagcctcccatagtgttgggattacaggcgtgagccaccgtgcccagcccatttctcttaagtaaataactacgaacggaacttgttggatcatacgctagttatatgtttaagtttatgagaaattgccaaatagttctccaaagtagttgtagcatattactctttcacaagcaatgtatcaaagtttccattgctccacatcctcattaacacttgtctttttaattttagccattctaaggagtatgtgatattcttatttgggctttaatctgcataggtttccaatgtccaataagcatatgaagaaatgctcaatacagtctgttgttatggtaaaatgcaaattaaaatcacaatgagatatcacttcagaattcccagaaaattaaaaaaaacaaacaatatcaagttttgacaaggatgtggagcaaatgggaagtcttagacattattggagagagtacaaataggcacataactgttcagcagtatctctaaagctaaacaaacccatacactatgtccccatcaatttcactcctaggtataaacccaagatagataggcatacatatccacctaaaaaacatggacaggaatgttcatggcaactttattcagaatagctcaaatttggaaataattcaagtatctatcgataggagaataaatagactgcaatataatgatgcagtggagtactacacagaataaaaagcaagaaactacggctacatgcattcacttcaaagtacctgaggaatcatgttaagaatcttttcatgtgactattggtatttgtatatcttctttttaaaagcgtcttttcaaatcttttgctaatttttaagttggcttgtctttctgttgttaatttctaagtgttatttacatattctcaatatagtgctgagtcagatatatgtacatgttctcaatatgttttcccagtctgtggtttttcttttcattatcccaaaggtatcttaagaacagaagtttttaatttgatgaaatttttacttttgatgaggtaaaatttatcattttttgttttatagtaaatgcttataagtgtcattttaaatccagtgtttggtaatactacctttaactatttttaataaagagttatttatttcgttgcttctataaaaatgaaaaaaagttcttatttcatttgcagataaaacatcgatagcataagcttttctgtttaaaccacacggccatggtttaacagggccaggaggaaacagagatgtggcctgttttcatgtatcataattaagatatcaagtttaacacagtgaataaacttcttaaatatcaaatcacaatatctcaataagcataaaacaagttgaaggagacatccataacagtgctttttagaatttaaataaagttctataaagaaaatttatattatatatatgcattatacatcatcttgttcacatagataaaactaacattttcccacattacatatctcttccttgaactattaaatttcccatgatgaggatgtatggcattctcacaactcacaatcacctctaggaacttgtaggtaaatgttaccactacacatattaaagtaaccttgagaagctgagcggctcctaggtaagctgctaaaatcactcactgcttcgggtttctacacaggaaccacagaggctccttaatgcctaatggctaatgctccaaaagaaaaactaaagaaatagttgtgaacttttaggttaagtttcagccatagctttgaataaagaaatccaataaaaacaattcagtactcattgcaaatatttaattgtgcacatttaatgcaaggaattcagtgctatgggggactggaaagacacctttgccctgaaggtgcctgcactctaacagagaagccaggacaaaatattatacataaggtaaactataagcacaactagtaattgcctttatttctagctcagatttagcatgttattttgaacatatatgtttacatgtctgtctttcgtgctaggatggtaaactgtaagggggaagggatatagcttattcgttactgccaaaacccaacacagaatcagtttcaacagacaagtgctcaataacaaatgagcaaagcaaatataagtacaacataaaagacatatatgctgcagtgagacatcacagctacacaggggactcacaaaaacatccagggaggtaaagttccagctgggttttgaaatatgagtagaatttatctggtagagattggtcagaatgagggagagaatttaaggagaaaaaagaatatttaaaagcatgcaggtaagagtgttctgggaaagtgtatatgtagttgtttgcttggagcattaggcaagcgtgcaagagtagcagcagatgtgatctgaaagggtaactgacctgactacagccagctttaaatgttaggtgaaaagttttacttggaaggcatttcagattttgagaaggaaagcaaattaattaggcttgtgctacaggaagataaatccagctgtggttttggatggaggggataagccagatgtgaattataaggctaacgacatatcctttttatgaattgctggattcaatttgctagtattttttccttttttattgtgttaaaatattaaaaacattaaatttacagtttaaaatatgcagttcagtggcattaagcacatccacaatattgtgcaaccatcaccgctatccatctccagaactttttcatcatcccaaactaaaactctgtacccattagaagataactccccactctccattccctgaagcccctgaaaaccactattttactttctgtctgtatgaatttgactactctaggtacctcacagaagtggaatcatacaatatttgttcttttgtgtctggtttaacttagcataatgtcttcaaggttcattcacgttgtactatatatataattttattctcttttgaggttgaataatattccattgtatgtgtatataatattttgtttatccattcattcactgatggatgtttgggttattcccaccatttggctactgtgaataatgctactataaacatttttttgttcgcattttgctgaggatttttatacctatattcacaagagacattgatcaataattttcttttcttgaaatgtctttgccttgttttggtatcaggataatgctgccctcataaaatgagttggaaaataatacctcttctactttctgaaagagattgtatagaattggtattattcctcccttgaacatttggtagaattcaccagttaaactatctgaacttggagttttgttagatttttaattacaaattcaattccttattatgggactattcagcttacctatttttcttgagttaattctgatgatttgtatttctcagtgaattagtccatttcatctaagttgctgaattatagtactcccttattatccttttaatgtctgtagatagcctttctttcatttctgatactgctaatttgtgtcttctttttttttttccttcatcagtctggccaggtgtttaccagttttactgattcttttcaaagataatcaggttttggtttcactaattttctctaaacagtttttttgttttttatctcattgatttctcttctttttatttctttccttctgtttgctttggatttaatatactcttctcctattttctttaagtgaacgtttgaattactgacttaagaactttcttcttttccaatacaagtatttgatgctataaatttccctgtaagtccaactttggttgcaactgaaatattataattttcattgttattcagttcaaatgttctctaattttctttcttctttgacatgactttttcagaagtatgctgtttaatttccaaatatttggggatattccagatacctttctgttgttgatgtctaatttaattctattgtggtcccaagaatatactttgtatgatttcaactctttaaaaatttttaaggtttgctttatgacctacgataaggtttatcttggggaatgtttcacgtgcacttgagaagaacgtccattctgctgtcattcgatagaatataatataaatgacagctgtgtttagttgatagtgttgttcaagtcttccatatacttgctgttttctgtcctcttgctctattgattgtagaaagtggagcactaaattctccaagtaactgcagaattaaaaaaaaaacaaaaacttctcctttcggttctatcactttttgcttcacacactttgaagctctgtatttaggtgcatacacattaataattattatgccttttggatgactttatccctatatcattatgcaatgtcgttttttatccctggtaattttcattgttctgacatctactttgtctgatgttaatctagacaccccagttttcttttcattagtatttgcatggtatatctttcttcatccttttacctttaacctatctatattgttacatttaaaatgggttttgtgtagaaagcatatagttaggccatgcttttttaatccaatctggcaatctcttttaatcactatgttagcccatttacatgtaacgtaactaccgatatggttgaacttgggtaggtctaccgttttattttttgtttaatgtttgtcatgttttttgctctcctgttaccctctttcttgtcttcttttgggttatttgaattttttagtattctattttatctcttggtgatatctctatatttctttttagtggttgctctaagaaatacaatatacatatctaactttacccagtctatacttagagtttttcttttaccacttcaaacagaatgtaaaggctctataagtgtacaggtccatttaccctctctttttatgttatagttgtcacatgtatcacatccgtatacactgaacctccttcctgacaatgttataacttttgctttcaacagtcacatgtattttaaagaatttgagaggagaaaaaataaatcttttgtaattacccgtatatttactatttctgttgttcctacttcatcctgcaattccagctttccctttgatattattccttccagcctgaagaatttcttttagcatttattctacagtgggtcttctggtaaaaaaaaaaaaaaaaaaaaaaaggttctttttatgtttcctttatcagagtatatgtctttatttcaccttcattcctgaatgatatttttgctggaaatagaattctaggttaatagctcttttatttccaaacttgaaaatgttgctccactgtcttctggcctacataatttctgataagaaatctgcagtcattcaaaacattattatcctagatgtaacacaatggttttctctggtttgctttcaagattaaaaaaaaaaaaaaatctttgtttttcagcagtttgattgtgactgtcatgtcatgggcatggttttctttgggtttattctgtttggggattcactgagttccttgaatctatacatttgtctccttcattagactgggaaaggttttggacattattttttcaaatatttatgagtctctcctctttattagacttcaatggcacaaattagaccttctgatattgccccacggatttctgaaggccctgttcatttttaaaaaacatcttggctctatattcttcaggtttgaaaatttctattgacctatctatgagttcactaactcttctttccactgtcatctgcattttgctattaagaccatccaagaaatagtatattattcagttccaaattttccatttggttattttttatacctatttttgtgccaagaatttctatctttccattcttttcaagagtatccagttttacctcacagagcatggtaataactatcttaatgtcactatcttataattctaacatccagatcatctcagggtggctactgattttttccttgacagtttggcatattttcctggctagtaattttggattgcaccctggacatttttattattttgtgagactcagagtcctcttgaaaccctccagagaatgttcactttgtatatttgagaaagcaatcaattcagttaggtttagataagaagctctgtcttgctgcctgtggatgatgcttcccatatcagttccattttcttttttctttttttttgagacgagtctccctctgtcgcccaggctggagtgcagtggtgcgatcttggctcactgcaagctccacctcctgggttcacgccattctcctgcctcagcctcccaagtagctgggactgcaggtgcctgccaccacacttggctaattttgttttgtatttttagtagagatggagtttcaccgtgttagccaggatggtctcgatctcctgacctcgtgatctgcccgccttggcctcccaaagtgctgggattacaggcgtgagccactgcgcccagccgtcagttctattttcaaaggtgtttatgtctgccctatacatatactagtctgaatttggaataatggtttatattgtaagttaattctcaaagctgttgttatttcctgggttctgttacatgtatgtagctcacaggtggacccaggatttgcatgagttcctagacagaattaggagatctcctcatccagctccctcctctagaattgctcccactcgccagctgtcaggggcctttttccccagtcttccgactacaaagtcagggtttatctcagggttttagactctcacactgtcagacagtctgtgcagcaaaagaaaataaaaataaaaatacataatgggattttcctccactcttcagaccacaggggcagagacagggtctttcttgggatgtcaggtgcctgtgctaccaccatgaccaccacagtggcagttcagctttccctgcaactggcttcacggtaggggtagaagagtaaaagggaggtagggaaagaaaagggggaagtttttagaaagaggagtttctctcaggttttgttattttttttttcctagcgttctgtgacttggcgcattcttgggtcaaagccagttgataaaagaggaaagaataaagccaggaactcaccaccatagcagtttttcttcaagttctgattgctctcctcagtgtgtctgttgtcatttactttcagaggccccagttagttgcttttgtaatctgcccagaacttttagttgtaaacagtgggagagatatactgtagtgaacttattctattttggatgatgccagaagttcaatccctttttgctatggggggttatgaaacatcccaagtaacacataatgaaagcctgaactggaatagaagtggggatagaacgaaggagagaagctacagaaccactccagaattaagaaacatggctgtgaaggcttcaaaaggtttactattaccacgcatgcttaaaaaaaagaacttacaggaactcccagctttacaaacgatttgttaatacaaatgggcattagaagtactctgccctgctgctaaggaaattatattcttggcctctatacagttttattcttgaatggattttcctacagaaataatcctacatatgctagtgctgtatttcatatgtacatcattataatactagtatgctactcttaaacaggtgcacactgggctagaaaggcttttgtgagttgacttggaaagctaaccacaactaaaattatgttttttatgagagaatgtattttgatatccaattatatttttggtttttatttccataaaaataatacatgtacataattttagaagttaaataatactgtgaacttcatagcaaatagaacccttctctagtcactccattcttgattactgctccctgaaagcaatttaaattacatctacgacagttctttctgctctccatttatttctcatccaatttttcttatggtatttaaatccctttcccatatatcatgtatgtaccatttcttgattttcaaaaattgactgaagaggattcagttttcttacaatacacacaaattcacacacagatacacacacatacaaccccatccttccaatataatgctttcatattcagtgtctttaactatgtattatgatttgcagagctacatggtgtactatgattacatttccttttttgttcaatattttgttttcccaggaattaaaaagggtttcttctgtctccctcccccttagttttcaatgctcctcatatcatcaccaaactcttaaaaagtagctgtaaatgtcccaatagattcaaactatcagttgtaaattttttcttggataccattcctgaagcaattcaccctttgactttaatttaaatcccctccagttgcacaggggtcattacgggactcttcacctttgctctgggagattcccttcttcctggatgatttgtatatcagtcacaataggccaagttatgctacagtaacaaatgacaccaaaatctcaatggcttagcttacaatgacacaggtttatttctacaagctacgtgtccatcatgggtcattgttacctctgtgccatgttatcttcatttcagaacctaggctcacaaagcagcctctgcctggaatattgctggtcatcatggcagaaggaaaaaaggcagtaaatcttaagctagttcttaaaatatttgctcagaagtgatacatatcactttcagccacatttcactggccaaagcaattagtatagccatacttgagtacaacaaggtgagtacatattaccattctgcagggtgggtcaatgcgtggtatagccaacagagcaaagataaataaccctctgtgaggaggcaacgctcatgtttgtgaacaataaagctattacagcacgcttcctatttcttgtttattctatctctttcgtaaaatggatccttcatcctttgggtttatgtctttttaatttttttactgtcatttcaagagaatttcaggaaaactaggagtgtgctcactctgccatcgtttacccaaaagtctaccaaccactcactttagaaggcaacttttatgaagatggcctatttagaagatgggggctacctgtaattttccttttcattcagggtactatttccgttatttatagcagtttttcccagatcctatgaatgttaatcaaggatttaaactgtcatttcttttttcatacaaaactacccaaaatggtaaattcactttaagacttaggaggagttttctaaaatagttttggtcctaaatatcttaagtttttcttttctgatttgatctaaacttcaggtttacatctgcaataaaatccagcatctaaaaagaatttcattgcaatcctataactgtggattatatcctatattcaacttgttggcctagctctgaaatatccctgtcagctgggcatggtggctcccgcctgtaatgccaactactcaggaggctgaggtgggaagatcacttgaggccaggaatttgaaaccagcctgggaaacacagcaagatcctgtctctaaaaaggttgttttaaattatctggatatggcggtttagcccaggagttcaaggttgcaatgaggctatgaccaatgccatggcactccagcctgggtgacagagcaagaacttgtctctaaagagcagagcaggagcaggagcaggagcaggagcagagcaaagagaaaaaggaaagaggaaagaaaagggaaagggaaagggaaaggaaaggggctgggcgtggtggctcacgcctataatcccagccctttgggaggccaaggtgggtgatcacttgaagtcaggagtttgagaccatcctggccaacacggtgaaaccctgtctctactaaaaacacaaaaatcagccaggcatggtgccatacacctataatcccagctactcagaggctgaggcaggagaattgcttgaacttgggaggtggaggctgcaataagccgagattgtgccactgcactccagcctggacaaatagagcaagactccgtctcaattgaaaaagcaagaaaagaaaggaatccccatgtcattgctgtctataacttaagtattatatttgggaaaatatatttccatatgctaatatcttatttagttgcgaaatgaaaaacacagtaagtgattactatatgggaatattacaaaagaagtggtctaattcagctttttgttaaattagtttttaatctggtaaaaactaatctctctaataactgatatatgcttgaatctcaaggctaaaaaaacttgctttttaaaccttggagcgtactctaaaataactaagtgtttgtaaatgataaacttggctcaaatgcattatttactgctagtacttcactgcttgggccttgggtctcgaagttaaggtttcttggttcaagtggtgtttccatctcaaaatagtcatggaccacagcgtatcacttaatccctttaaccttagtattctcatttataaaacaggaataacagtattttcaagaaaaagttatgggataacccatataaaacctgaacatagtgtttggcagacagtaaatgtttgttgaataaatgaatgaatgaaatgtttgccctaactttaacagctatcttacttacttttaaagttcatacaggtcaaaccccattttaacaatgtttaaaccctttaaacaatgtataaacccttttctgtaataaagtaatctattttgtgtttgaatgaagttactctatttatcaagcatctttttttggctgattaaatgaagagagtttgggattttcatttctttattttgctcttctacattcatccaattcaagaaagggattttttttttctctcctaatgaatctaaaaaacctcaccacaaacctctatcaattctacctttgtctatttgaaatgcccaaatatggcctatgacatacataagccaatgtgaaatgcaaagaccagacagagagattcttgactatacagaatatcttgaggaaatagtcttacaaaaacaatcctgagtaaagctgagttccttgcccaaagaaaggccaaccaatctatatgccaccaaagaacatgtaaaccatacataattattatataacatatttgaattctattaaaacgtttaagaggtatctgacactctgacagcacctgtggtaaacccttctgtgtacctttgatgcccgggattgaaaaggcttttgcaaacaacataaaaccaaatgactctgggtgcaaaggcaatcagtatcagatagaaaggacaaaaaaaaaaaaaaggcaaaatgaatccagaaaagtaaatagatccattccctttcactctttgttgttcaactgattctatttcttttgtatggaaattcattagaaacattttaatatgcatcccaaaggctacctttaatttgcatccatgtttaatagtagagcagtacaggtggtgtggaaaaagcaacggaagtgaaatcagaatctgtgggtttttacacagtctgcctcctcactggagtctcagtttcctcatctgcaaaatggcaatgaaaatgtctactccacaaaattgtgattattaaacatggtaaaataaatgaaaatcattataaaatacggaaacataaaataaaatatgaaaaacaaattaaaatagaacagtgccattcaatagaaatatgaggggaaccacgaacgtgagccacatctgttattttaaattaaaaaatacaaagaagcaagtgaaattaataatatattttattttgcccaatttatccaaaatattgtcatttcaacatgttaatataaaataattaataattgaggttttttccttttttttttgcactgtctgacagttggtgcctgttggacactcacagtgcagctccgtttagactagccacacttcaggtactaaacggccacagtagttagtgactatcatagtggacagcacacgcttagaaccaaggtgtatgtttattagatctaaatagtattttctatcagataaaccctgtgggacttaagaaggttattttttaaattgatgcattaaagagagtttgtgtttttatatttttggtatagtagttaatatgtgatctataataagaatttaaaataaaatattacctataactgatcagaccatgtatttatccaaaataaaagcaaccaaaagtgatgattacaggtaactttgtagttattttattaggacttaaattatatattaatttgacataaaatctaataatctcaaaaaaaaccctgacataactataagcacacaaaacaattcaaactataaacaattcaaactggcatttctgtagagaaggaaagggtcctggagttggaattccaagtctttagtaataaactacaattgataaagtgtacctttcggcaaagaaacatgaggagaaaacacaatatttttctatattgcaaaacttttcatttcacaggacctgccattagtaagtcatattatagtttcaatagctttatttttttctctcataaaaatttattctctaaataataggataaccacctattatgacaattatatacagcatcattttaatgcatcttaatgatgcattggggttaaaatgtcaaatattatttacattatactcattaaaattacactgaatagtatatggtaggcaaattcatgtatcttgagttcaaagagtaggatgaaaaatatacagaaaacatttcttcactgcaaggtctttatgaaagctgtccacaaagcataaggtgcatgtgtgtgcacacatatgtatttatatattgagtattatgttcttgttttctgtgtgtagagatgtccctgcaactggcatattttcagcaatcttcctctgggctgaccagcagtgcaacacaagtggtcagaaacgatacgagagtaaaatgtagtatgagaaaggcgatggctacttcatttcaaatctgacaaggactatttagttacctactacgacttccacattacaaagggttattaaattcttaatgactgaaagaaactttttggactttgattttttatttacttgtattcagaagatggcactcctacaatacaggccctcaaacactttgtcagctcactcggccaaaagtgatacataaagaaaaagtgccatagcagactcgttaattcttcgttcagggagccacctatgtgtgtgtctctgcagtctcctcactaagaacttgcctcacccagccctgctcaggcttaagatcagcaatgggttcacactacaaatccataaagcttcaaaagacagggtttaggtttatatcatcatatttatattcacttaaactcttccaaggaagaatctattccatcattagggcatgcatttcctaaacattaacatttgttaaaatgctgacaccccccatagccactgataccaaatgcaaacacaatggcaaacactgtacaattttaaacacttggccaaacttcagaagtaaaacaacccactgtagtaagaaagactcacatctggcatttctgtagagaaggaaagggtcctggagttggaaatccaagtctttagtaataggttctgtcctattttccatgctcagcctattcataatggtgaatccatgctttggagaagcagacctaaaaatcacaaggagtcagggggaaatcaatagacaaattgcttagtatgctatattttcagtataagtacattctgatgtgtctctcaacctttgtttgtatatgcagctttatataagcagcctgtacacgtacttcttcaccactggcatcattatggactaattcccatgtaatgcagcagcactggcatgatgattcatttggtaaaattgagtcatacttcatttgtggtgtgtgtgtgtgtgtgtgtgtgtgtgtgtatacagatgttgtttatttcttaacctaacgttgtaaattcctttaaggcagagtaactactttttaaaacattactgacttttaaagaatactttttaaaagttaaattaattaaagatattttaaacaatcttggtagttaatattagagtgtacatcacaattatatgaagaaaattttcatagaaaattttaagtgttagtctgaaattgaagcctgcaaaatctcttagtgatatgaagcaactctgaacaatgaacttgtgaggacacagcctgaactagaagtttacataacagtgcaaagggcagatactttgttttcttcaatgcaaagcaaacagcttcacagataaaccactataagtttttctctataaaaatgtgacatttagtgatgttttattttcatttcactcaataaaccttgaatgcctgctctgccaggcagaaagaatccaaattatactgagtataaactctaacaactacatgtgcattcatctacccttgggtgacagccatatagtaattcaactgcgcaacttccggtgacaaatgaaacaccacatacttacacactgaagctgaagcaagcagaattcatttatttactttaaatgagggtgctagggctgttattaacaaacccacagaaatgttatgagcaacaggaagacaagttgtttatgtcttagttttattttacctctatttgatactgatcaaggaacacagctacataaccactaccaggattttcttctgaaacctccaattttaaaattgatgggaggcaatccttgcctagcttattttacaaaggggtaaagtggtggtaagcatacaatcaataccagaaataatcatgatcatcacttcaacttaaattcagaggaagaatgaaaatgtactcccaaagagctctgttaggggtcttctggaactgtcaagttcagaaatcaccagtgggtgtctctatgaactctctattacagaaaggaaggcatgggaggaaataaatgattttttaaatgggattaagtgttttcatacaagaatgagaatttgattctgcatgtatttcattatcacaacaggatctcacctctttaatagtacagctactatagcatctcataatttagaaaataggcccaggggataaatgtgccaactgctctaaagcaacttctgtaagagaagtcaaaataaatcactgccagctccattccctgtaacaagcctcccaccccccacccaccatgagttttacatgctttttgtaattcgctactgaagaaagccttcaacattctaggatctgggaggtttttgttttgcaggggataagggaggcatcccattcttgaggagttagatttggagaaaagactaaaaaacagcaaaggatttttttctcaatttaatgttttgtttaattgagagttccattagagacttagagtatagtaagaaatccttgaaaatacaaacttatatttggtctggatgtacaaaagaaaatatttgtatgatttgttcctcttccatagttaaaaaaaaaccctactaaaaattccccaaatcaatcattaatacttactaatacatcttttctgtcacttctccaaagaatcataatgcgtgttgtgagagatgagtgagaacgcaccctgtgtgcatggcacatagtacagtgcaaccctatggcttttgttgtaaacttcagaatcctcaagagtgctcatactctacccaataaacttgcctgggggcatgctctggtgctctggatgtttgggagcataatgtagactcatataccaacggttcttgggtactccactgctcttctgagactgtgaagaacctgacctccttgtcaccaagtgtgctggccttgcctcccattccttccttccacctcccattgttgcctccactggaacagaccttcctcccctgcagctgagctccctcctgcccagcatacacagacctccatcatgcccacactttgccccaaatgggcctctctgtgctgttctagtcctgcttttatctttccagctgactcatctgtatccttgctggccctcaaacctaaccataaaccctcatcggttcctctttatactcactccttcagggaacagcttttatttcatggtttcaactaccaaattacttcagacaactctaaaccatctccagccctgcccttactctgaggggctggccacctccacccaagtgtcctgctaccagttccaaatcattacttcaaagtaaaatgagggctgatcctcaagccacattcttgacctcctgtctttcttttccaccaatgcttctgtcattctcaatcttccatgttcaaaatattgtcatttttaaaatttcaccattgcaataccctttccatttcaatttctattattctaatcccaactctcatcatttcatatctaccccactgcaataatcttctcactgtcctgactccaatttcttccagaactagtgcgtccccatgaagtgaatacactgactttccccatacattttctctattactctcctgttcataagccttcaataacttcctactgctaagaaaataatctcaaaatccagagtctgccattccaagctagcaaatctctttacacttgctaactactataaaccagtataagccctctgcaccacatctccctcactgtccctttaacacaccaggttctccgcccctgcttttgccattcttcctgttgagactgccttccctctcctctatgcaagctaagttccaccatattcctgaggcccaattcaagacacatcactctataaagcaggggtgtccaatcttttggccttcctgggacaccttggaaagggaagaattgtcttgggccacacataaaatacactaataatagctgatgagctaaaaaaaaaaaaaaaaaaaaaaaaaaaaaaaaaaaaaaacaacaaactcttctaatgttttaaagaagtttacgaatttctgtcaggctacattcaaagccatcttgggccacgtgtcctatgggccgtgggttggacaagcttgcgataaagccttccatgatcacagcagcccattcattgctcagaatctatccactggcacttaggatactctatcctgtattgtggcttaccataaacatgaatatatgtggaaagaaaatacacttgtgtgtgtgtatttcctgtctccccagtgaaacagatacccctagaaaggtttatattaggtcttttaatttcatctttgtaccctcattgaaggtgatgacctttggctatgacattttatgtgaatgtttatgtgaatgaaaagtttatttattgagccaatatacataatgtatgtctctatatgcactcgtaatttgatattaatatctgataacaagaaatgactaaaaacatgagtttattaaatctatcctgaaacatattctattgactagacaatggaggactgaaagacatcttcaattttggatcatgcttttttaaagagtcaggggtgggagaaaagtgatcaacagccaggtgcggtggctcacgcctgtaatcccagcactttaggaggccaaggcgggtggatcacgaggtcaggagtttgagaccagcctgaccaacatggtgaaacctccgttgctactaaaaattagctgggcgtggtggcgcatgcctgtaatcccagctactcagaaggctgaggcaggagaatcacttgaactcaggaggcagaggttgcagcaagccaagagctgtgatcgtgccactgcactccagccttggtgacagagcgagactccatctcaaaaaaaagaaaaatgatcaatgaaacccttttccaaatattaactgaacaatctagtatttctgatagtgttcttctagctccttgccaatgcattatattcaagaactttgtgccattcacttgaatcaaagaatatttaatctattttaaacagtgcccagtcaatgatttaagttcatctacattgaagtttaaattatattctgaaattagtattcatcacgatataccaggtgacattatttggtattcccttcttcgtgtcaactaataatttcaaaactgagatttaattcttttacttctttttgaaataaaactgcatgcacttgaagaagagtgacacaacggagctaaaatattattttgaagattagtttctttataaaagtgaaacactcttaccttgtataaacaaataaggttccttccacatcagttttctcctaaacaataaaaacaaaacacacaagacatgtatgttctcttcaattcacaaaggtataaaacaaattctcatagaataggaattatatataacttcaatgggccaaatatacccaacatgaggagttattctcaggaaaaggagaaagcaagttctatgtcatcattgtgcctctgcagattaggcagcaggaagcagtctttcttttgtcatttataaaacaaatcatcattatctctctttaccaaatacagggatagcagcatacccttagctgaaacaatgagaaaataagtgtgctatgcggatttaattagaaagaagagtgctgcctttttctccttccaccacactgggtatagagaaagctgcagacatcactggtgtctgcatttcactatccttcattttgttttctgggttcattttctcctgccatatccagtgacttaggagagcagatgatctgtcaataactttactttgactgctagacagagagggcaatgatgccacagagttctcagatgaatcaatcacctacttagtgtagtatatttacagtcaaggtctgacccgagatcactgaagtaaagttacacaagtattaccaagttaggactcaagaaatctgcctgagaaaatctgggagaggtggtaaagttaaaatgatggtttaactaggtcacttcacatttcttttccatttctccaaaggcaggaagctaggccattataatattcatccatataatgcatactaaaaaacacacatgtaagtatccaggtgtttgactaaccacgaaccagacctactgtaattcagaatttaaaatgtacttttgcaatttacatggtttaatttcagcattctatttaaacccctgatattttattattaatattcatcaccataatcattcaaaatttaagtactctgtaattctggtgaaaaatacgcccttttaaaaaaagcgtaatgtcaaaacagcagtttttaaaaggcacacaaggcatgatcctttcacatgctcaggcaatttcagcaaatttctcattcactttagttcagtgggtctcaaagtgttatccccagatcagcggcatcagcgtcacctgggaacttattagaaatgcaagctcttgggctcctgcccaaacctactgaatcagaaactctggggatggtgctcagcaatctgggttttattaaactgtccaggtgattctgatgtatgctagtttgagagccactcactgccttagttcaacaacatactctctgcccatgaaattatattacaagtcctgaaaacaaaatccattatggcacaaatcatatcaagctattatcaagagtaaatggctataaaaaatcattacctagtaacaaaatatttaatctcaagatgtttattattatggaatatgaaattataaataaagaatttagaccaggcacagtggctcatgtctgtaatcccagcactctgggaggctgaggcaggcaggaggatcgcttgtggccaggagttcagtttgagaccagcctgggcaacatagtgagaccttgcctctacaaaacaaaaatttttttaattagccaggtgtggtggcacatgccggtagtctcagctactcaggaggctgaggagggaggattgcttcagcccaggagtttgaggctacagtgagctatgattgtacctctgcattccagcctgggcaacagagggagaccctgtttcttataaataaataaataaataacaattaaaacaactttagccagttttttccctaacataaaagcataggtaagtcagggagttcatccttaaactagattcactatgaagtttgtataaatcaccacaacatactgtgaaacatatccttatttctgaaatgtggctcgtttgcccctgtactttgaaaaatatccaagtcaaaatgaaaaaatatatatacagaaacattacttatctttctttgaaaacaaacatggttaattcctatctgctgacaaatgtatatcctgagtgtacctgaagcactaagaattacttacacccaaaccaccaaagtattaatcaggaaaatggcccctacagtacagtaaatgctacctgaacagtatacaaatttttggctgtccctaaagtttaactgattcagtcagcaagtattcacaagtccacaaagcatttaaaaataaatttgtagaaagtatttggtattatccattacattgttaggaaactgagccaagatacaggtgatagaactaggactttgcagaacctctatgtagtcaggatcactccccacaagatcaaaacactctcctggtcttccagtatctgaccttggactgtttcatcttagagatctgaataaggatatctatatatatcagcacacataaaactaaatagcttctgacttgtttcctttcttccttgatgtaacagaaattctcttttcttaattaaaaaaaaaaaacctttaatgccacattttagtttttaaattccaaggtcaaaaatgtaaaaggcatgcttctcctaaaattaatctctaacttataacaagtaattcttaaaactaagatttttatttagcattacacacaaagaatatgagtttgttcataggaaggagttgtgtttcagtaatcacaacctgggacctgtagtggggttcttgccagatcatgctgggctaattagtttattattatatgtctcagtttctccattgaaaagagataaccaggccgggcacaggggctcacgcctgtaaccccagcactttgggaggccgaggcgggtggatcacctgaggtcaggagttcaagaccagcctggccaacatggtgaaaccccgtctctactaaaaatgcaaaaattagccaggagtggtggcaggcgcctgtaatcctggatactctggaggctgaggcaggagaatagcttgaacccaggaggcagaggttgcagtgagccatggtcacgccattgcactccagcctggggaacaagagcgagacttcgtctcaaaaaaaaaaaaaaaagagagataatcagcttacactactcagatcttttgatgaaaaaacgtcaggcgctctatgacacctggataaaagagactttgaaaatatacatttctgttctattacagctgcccaaattcacgcattttcctggcccctccatagttatccaagggcaaccagattttttttttctttctgagcaaagtccagggttagggatgtggagaatagctaaaacaagattagatgttccttagatcctttaaggaggacttttatgtgaaagtattagttaccagtcctggggtattttagcttaaattttaaaagtacaatttgaggatttaatattatactgtattataaaatctaacaagtgctaaagaaataagcaattcagaattcaaaatactaaaaaacccaaaatggaatataaaatagtgctgttttgcaaattttggggactctgcacactgtctgacacaaactagctcaacgcaatctctattttaacttgattattctcagttaaaataatcaaaaagtaggtctcaacttatcctcccaaatctctcttcatcatgcatgtagcacgtgagtcacctatgaggctttcaacaatatgaaatgcctgggtctcattatccagaggttttagtttggcatttttcacttttaaaaaactctgacttatttggatacaccaaaaacttagaaaaccactagctaggaacacaacgttagtcactttagggcagttttcaggctcagcattccctggcctctactctatagatgtcacaacactcttcccttcagtgtgacaaccaaaaacgtctccagacactgccaaatgtcacctgggggcaaaatcaactccagctgagagccactggtctaaggactgacagctggaaaataccagggttatggtcttcaattgacacataggtattaatattttggaggcggggggcagtctttcctggcaacagggagtaggtctaactctaaaattcctattccagtcatcacataatctttcttaatccttctttaaagcagttcattttctagacacctttccttcctaatttctcctcctttgaaaggctgaagtcattcttcatccattttcagggcaataagaattcccctccttaagatcccccctgccttcttgtaaatactttctcctctattctcaacaatgttctcatattcttattaggtttacattcaaacggctcccatccacagtgacagcacatggagacagtggtcataattagtttgcctccagcaactgctctgcagttgaactaggtctctctgtttttctggctaccacagccttgaagattagaactttgaaagaatgaccttttcctgaatgaattatgccctgtctgaaggcaacatatccagcaagcaggaaaacataactcctgtaattaatgcattgtgacacatctgctttttgatgaggctttaggtatctaataaacatctgtaactatcttaaaaaggtatctatcacattgataagggtcaaaagcctataggaaacaactattattcaagagaaatgctctactctctttatactgacagtttcttgggattctccagactcgaatcccagtgtcaagtcaacttacagaactatacatccctggtcctcatctctctactacggaattacttttacaggattataacattatacctttagcatttttctacagagcagcaaaatagccatatgtagaatatctttttatatatttttaattaccatggaggaaactgtctatgttgctcaatgttctttatgtaaaaacgaaggtgacacctcgaaaaaacaaacaaacaaaaacaaacaaaaaaagtaggtgacaaattcccctggaaactagggggaaataacctctttctcctgatcaagaggtacactttctattacagaagaacgaatattaaagagctcttcctgttctccttttgtgtttggctactaggagagcagacctaaattctttgccccattccggcaaatttcctccgttaagaactttgggcaaaactgtttgtctaccccattcttgcttgtctttttatttttatgttaatgattttcaggtgagttttttactacaggctgctgaactatactgcagataagtaggcttatgaatgtgggtgttaaaaaaaatacagagttgttcaacatggatgttttcctagattaagttttgatgtttatacaaccgacttgaagaacacaaaaagtttatctgaaatccattcatcaaggctaagttctccatactgttttgtaacttattttaaaatgatggatatcatgtatgtgatacataatggatgatgaatattatttggacaaaactcattatgagtaaagaaacaaaattacatgtctctacattcgagtgggtgggttacaaaattacaagcagcaatccctgcaacaggattccagtgttctaggcttctaccccattctaactatgaggaaaatgaaatttcattccattaccatttactgggactctgctttgagaagagcactaaaataatttggctcccaaatgacctccaatatcgaacttggtgtgctgccgtgtaataatcttcccaagagcatcagcttccttctaagtgttagaccctgccccattttgtcttttatttgacgaggttggctcttttcttggtgtttccccttaagtttacaacttgcagatttctccccttctatcaagttttgatttctctttgccccatctaagactgacattccaaaatcagaactctgcacttttattcgtctgctgtccctgcctcccccatagccacagattcactgtaacagaactctgctctactttctcgagcacatcggtcttccggccataaggtatcaggtccttcctttccttcggctcttatggtgccgtacccgatcggtctggtctcccagcgttgggtacgttagagatttaagtcttttccccaactccaggtagctccacagatccgccttccttcccccaaacccccgagaccccatctccacaacttcggcctcagtccccagatccacccacttccagggcgtcaacgtctcctccccctcaccgggtcctcaagtcctgagtctgacgccccccgcctccaccccaaccctgggctgcactgctccgccgcgtccgcacgcacccactcgttggcccgatggccgaaggtgtacagagccacctggctggccacgtccacgatgcggttgatataggggtcgtggcgctgcagggccgctaggctgatgtcgcgcccctttcccaccaggccgcctgccgccacggctgccatcttccctccctcccagacataggcacggggctcttggaagccactctcaatagatcgcagaacgagcgagctgcctcgcaaccgagaacccacggcgaccacacggcccgggaggccttccggctccagtcacccccaccctcctgcccgccgacagacgcaaggcctcactaatcgatggccgcgccccgcccactgaggatcgttgccactggcaacgacaagcccaggcctgccctctgcatcccgtttctttctccaagagctgtttttctacgcgctcgagcctttgagctgtgtgtgcggtaggatttccttcttggatgtgttcgaccccttggcatatcttttctttggcgcttcagtgatcaaatctatcacaataaataagcctcgagcatcaagaactctgaagagaaagagaactgaattgatttctgaatgcgctaacacccagtggttctcaaagtgtggtgtggtcctggaaccctttgggagtttctgagaccctttcaggggatctgcaaggtcaaaaaaaaaacaaaaccttttatgacaatgctgagacttacttatttgacttgttcactgtggtgacgttttgcagacaatggtggttaaaagcgccggtggtttaacccaatcaaggcaggggcaccaaactgtattgctagtcaaagtacgcgtcactaatctgcactctcagttacaaaagaaaaaaaaaaaaagaagaaggtagagagccagtgtcacctgatggtgttcttgataagcagtaagaattattaatttcattgaagcttaatccttgggtacaattctttttaacattctgcatgaaaaaataggaaataggcataaagcacgtctgctgcaaaatgaagtgtgtcatatttgtctctaggaaaatacttctgtgcttgagttgtaggccgaattcatgtttttatttttattttcataaaacatttttacttgaaagaaagatgggcaaactatgattattcaaacaggtacttgacagacatttttctgaaaataaataaagtgtgcctgtcactttcaggaaaacaagggacaattactgctgccaatgataatttttaagccttcaagccagaattaaaagtttagaaaatgtgtatctactgccatgagcttgacatctcagtacttaatgtttttttttctgatgagatcagtgatgatattaatgagcgcaattttaacaaatcttgtataatggaaagtgtcaatatctcaaagatctgcttaactcagtggtccagtattttccaaaagaccaatgtctcatgctacataatcatgcacaggcaaaagatccattcaaggacaaggtggactaatggatttttaatgtaacagtatgaaaagttaataggatttcagatagtacattgcagctaagctttgagaaactccagcttgtcaagttttggtatattatccaagaagaatatccacaattgtctgaaaaactctattaaaatatccatctcttttccaactacattatctacatatgaggccagagtttcttcatatactccaaacaaaacacacatagcccggggtctttaaagttatttttaatttccaatatggtaaatataggtgggtataactcacataaacaaaagttctctgagggagtccttaataatttttaagagtgggccaggtgcggtggctcctgcctgtaatcccagcactttgggaggctgaggcgggcggatcacaaggtcagtagttcaagaccagcctggccaacatggtgaaaccccgtctctactaaaaatacaaaaattagccaggagtggtggcaggtacctgtaatcccggatactcgggaggctgaggcaggagaatcgcttgaacccgggaggcagaggttgcagtgagccgagatcctgccactgcactccagcctgggtgatagagcgagactccatctcaaaaataaaataaataaaaagtaattaaaaaaataatttttaagagtgtaaaggagtcttgagactaaaaagttgagaatggttgatctaaaccatttatctagcattaaatattagaacaactgtgcagacattactactcacattcataaattcttacctatttgatatagaaatatcatagatacggcacacataccctctcataataatatgttgcaatataatctttgcagtcacaatttcaattgtactgaaattcttggttaagctgcattttggagtctcagtcctattgactcccaagcctaacttcccagtggggaagaatacagcaatggctttcaaacaacttttttttgactgaggctggggtcatttgcagtctgactgagaacatatgtttatatatttatacctgatattaactagaataaatgtttcaatactaagtatacagacattttttaaaatgctatttgtgactttgtaaattggtttcatgaccaactaatggattgtgacctgtagtttgaaaaacatagggctgcagcaactgagcaaccacacaaagctgactagacaactttccatgttagttcactacctttttccagtgttactgacctctttgctcttaatcacatatgtgcttctaaaaacaagtttaatctgtaatatgggcaatggagaattttgtgattaattcttgaactagtcacactctctcacttgattagctgttctaattttgatttttcagcatgaacccacagattctactttgcatttccctcgtacatataatgaggcattgtttttcttttgtctgttaagttccatgatccttacacagatcattgtcctcataatttttcagtctttccatctttaaagtgtaaagaatagatcatggcctccaaagaacgaattgctttgagctcattagagaagacaggcaatataggggccattgtaaaagcttaaatgttcataaaacaaaagtgtatacaagtcttagtgatctgtatgactacaattgcaaagcatttatggagtgctcacttgatgaaattcattaattcttcatgatttattattgcttcttgtgtctgtgctgaaattacatggtcatgtcttctccagtctttgatctcactgatgagtaagatgaagatacccttactttgcttacggggaaaatttcacatatgtgaacaacatgctaatatgacccttagtagagaagagttaattttttgtgtgtttagagttaatgaaacaacccatcttctgttctaacctccttgtatctgaactcttttctcccaagtatcttacacattcctatctctgtacctttgcccatctgtcttcttagcttggaatgaccttttcctggaaaactcacctcctgtcttctcccatacaatcctttcagcctatgaatcctcattgcattctgttgcgatttttcttgtggcacttagctcactttatcctgacttagacttatttatttactacgttacatatacatttttttccaattctaaaaaaaaacagtcattgtaataaaagagaattgttatagaaaatctagcctgaaaacattattgcaattgaacaagaaattgggctttgagtttcttgacagataagcaaaaaggaggaaatagtatgtttcataaagttttacttatttatttatttatttatttattttttgagacagggtctttctctgtcgctcaggctggagtgcagtggcacaatcacagctcactgcagacttgacctcctgggttcaagcactcctcccaccccagcctcccaggtagctgggaccacaggctggtgccaccatgcccggccaatgttttttatattttgtagtgatggggtctcactacgttgctcaggatggagatgttatttttcatgttttgtagtgatggggtctcactatgttgctcaggatggagatgttactttttatgttttgtagtgatggggtctcactacgttgctcaggatggagatgttattttttatgtgcttatcaccacgtagtctccctagcacttggtccaatgccttgtacataatagagattcaataaatgcttattcttttgaactaaaccctgagttagttgaatttactcattaaatgtcagcattttttaaagagctcatgatttataaaataatgaaatccaagttgggataaaaaaacgtgcaatagcaagtcctgttctctcagattttatattctaagggagatagaaaaacatggaaaggtttttggttttttaactttcaaacaaaaaactcttgaagattagaaatcatactcagagaaaaaagataaataatgttgcaatgacttcagcattgccatattgttcatctccctggcccacagagatttatttattttttattcttttttcctccccacaaaggcctaaagctctgaccttctaggatgacgccagccttctgccttctttctatttgaataatctgtgtttgtaaaaccaggtcatcatcacttaaccaaatatactaagttgcaggctcgatattagtaaaagaccatttcgaataggcaaattcttttttaatccgtgtaacttccatttctgttggcgcccagagtgctggcgtacttccactgtgtttccataagcctcatgatgataccttggacaaatattggtgacttcgagtttcatgattatattataattgtcattatgagattaaacatatgctcacacttggttttacaaagttggatactgcaatttaaaacaagtttgtagaatgataaaaaaataatgtttgggtctggaatttttataccatggcaatgactgagtaagacaaaattcagcatctaatcaattaaggtaattgtaagaagacagtatgtttagattctttgaaaatcagaatataactgaaaactggttttgtaggcatgaatgaatgtttgcatacaaatatagattgactatatcatcacaattttaaaacacaaatacacagtctgctttattagtactcttttctttgttgtgtaaataccctctaagtctggcatttgtcctgtagtagaatatgttagaatggagaggaagagaggagctttcaggatgcccctaagaatttgtgattctgagatgacttagcctctgatgctatgcttttgccatctgtatgagttgccctttttttgctaggaattttattccaaaggatgatagaagtgaacaattaactctctctccctgtggaggagaacagtttgaagcagtgtgttatcagttgttttcaatgcatggttcatttatgttttaagcagcagagcacagtaggaagggcaccccctcctggaaagggaaactagtttcacctctttctatctacgtgaccttcaacaaatgacctcacctataccctggggaacataatatttgctctaccaatttcactgggtaaatgagatcaagtgagaaaatgtaccagaaaaagctttgcaatctgtacaatgtactgcaaatagaaaaaaaacccaaaaaactattacaattagtagtagtaagagtatcactatcttcatcatcattattattagtttcatgaccagtattattctttctaatagaagcccagaagcgatacttttaatccaattacccaattagtgttcaaatcaaaaaaattctgcataagtgacaaagaatatgttaattcccagggcagcacattcccaatatttttatacgctaaaggatgcaagttaaaacatatttatcagaaacttcacagaggaagataaaatataggagacatagctctttgttctgcagggttatacaaaaggttaagatttgaaacaattgtttgagagccagagcagaatgagaaggggcagataatggggtgaagactggggaatgtggggaaggcagacatctaccagggggggcttttgctagggtaagaggtaacctgtacctttgaaaaagtcagaaattctccagtctgggccttatagctccctggactagacctctcttaacttgacctggagggggactggggtaattagagctttttggagtggagagatcactcttgaattgaccactctctttgcttctctctgccagtcccatgaaatctattaatttactgtcactgtcaggagtcaggtgaaagctcagtgggtctagaggatctctacaatagctacaccttttgatttgcttctttgtatttctgggcatcaccctaagatatgaggaagcacctttaattccacatgaagagatcattggcttaaaatgcaaagacctgatagtgctacccaacgtccacgagtctcaaagtaatcagtcatttgattatcaacagggagaaaaagatgttaagaaagaggaagtagaggtcgggcacggtggctcacgcctgtaatctcagcactttgggaggccgagatgagcggatcacctgacgtcaggagttcgagaccagcctggccaacatagcaaaaccctgtctctactaaaaatacaaaaaaattagctgggcgtggtggcaggcgtctgtaatcccagctactcgggaggctgaggcaggagaatcacttgaacccgggaggcagatgttgcagggaaccaagattgcaccactgcactccggcctgggagataagagcgaaactgagtctcaaaaaaaaaaaaaaaaaaaaagaaagggaaaaaggaggaagtagaaactgcagaagacaaatctctgttttattctcagtgtaccatggaaaggacaatggaagttgctggccatgcctctgaaaacacaggcagctctgtgtcacattattgaggaagatgatattggatgtggctgatttcacatacaggagccttgtcctgggacatggaggagtgttgagggtggtcaccagattgcctttcccattaactaggtgtgcactagctgattcattatcatagcgctaaggtcatagagggatgacccgaatgattatctgctttgagcaaagaacccacagttctgggcaagtcacttcacttctctgtgtaataaagagattgaattagaagagtgctacgcagctacggattctgtggttctctattaagctacctcggttcatatcaaatgcgtatcaaatctttacaaacatgtagaaaagcccagaaacaatactgaacaatatgtttagggaaacatctcacattgaaattaggtcaggaaagcagcccattaaagactttttaacgttaaatcaaaactaagggccgaaaagcctttcttcttccatttgttgtgttccctcatgctcgaaggaaagctgttgttgtggggagaaaggaatgtttccccttgccatcctgtaggtggcttcctgccagggtggatgggctctcgctgtagattgctaatccaggtgaaatgagtatttcaaatcacctgtgatgatttgcatggcagtctgtaagaagcagttgggaaagagtgtcagagcctccttggtggaatgcatttgaagaattttgtaattacttattgttcttacaacctactatgttaccttttcaccttgtcattgatttttctctttttaaactgatgtatgaagccccaaaggtaattgaactgcaaaatattgtgctaaactaaccttaagtccaagatgagaggctttggaaaaatacttggcttggtcaggagctagaactctaatagtggggactagggggtagagggatgaaggggaggtatagtatctacttctataatgctgagatttaagaatatttccttacccggtccctcaagcctatcataaatattctatattgggttgacaaattacagctcacaggctaaatctggccctctgcctgtcgtgtaaataaaattttgtttgaacacagccatgctcactggattgtctatggctgtttgcaccttgcaacagcagagttgagtagttgcaacagagaccatgtgatctgcaaagcctaaaatatttactatctagtcctttacagaaaaaggcttttggcctgtattatttaaacaaatccatacgtgagttatactgaggactctctacatgctcagtaggcacccagtttgtgcacattgtaaatacacaatagattggaagcccagtttctattctcaaggaatttaaaatctagttgaggagacaaagactagcatacatgaaaaaatgtgaacagtaaaatacagtgtataatcaagggttcagctgtgatgtacaggcaagtaccagaatttggagaaaaggaaggaggatcagtgagacctctagtagttggggaaagcaatatttagtataaaaagttccaggacacaataagagcttggatgctcccttgagatccattgtaattggatgtgacctgtatttctactccagtgtcatttaaatcactgttatttttggccttgtgcttagaggacacctaaatgaccagaaatatttctgagtgactttagctgactgatttttctgggatttgggattccttcaatctccctaaactacagaaaattaaacctagccatagtggcataatgtctttctcttttggagacaatacagcaaaatgattgcaagcatgagctctgcagtcaaagaaacccgtctcaatctccctctagctgtgtaaacttggggagactctaaagctctgggcctcagtttcttcatctataaaatagagacaacaatagtggtaacctgctagcgttactgtgacaactagataatataatgcctgtgacgtgtttagaatataaagtgcctgcctggtatgaagctaggtctccatgagtgtttagtcattggcccttgctcctgagaatagcaagatttatatcctgcacaaaagagtcatacttagttccagaacaaaaattagtactttatcatttataaaggcacttataacaaaatgtactaatgtaaagcaaagaattactgctcctcattttttggtttactaatggttataatttttaatttttaacaaattgccattgccaggcccctgatttatttctgtgatgtccttggggatcttgggaccaggagcatgatgcaaaaaacacagatacagatctctgctctgatactaatgcaggaatcttgggtgttttcaggacctgttgtgactgtctttggaggtaaggcagagggcagtggtaccagccttgtgggctggaaggcagcatctgtaggttctcacccatttctgtgggtatggaagaaattacgtagaatccagaccagtttttcttatctctaataaggagataatgttataacatttatttttgtgcttgttgtgagtattgctgaaagagctcttagaaacactttaagtgttttgatgtaatcataaaatatgaggctttagaagtagggtttgagcatccacagaaggctctgttttctctgtggataatgtctgatgataacattgttttctgttttccttgaggtaatttgaagattaaagggaagggtgttttccacatttcctgttggtaataaatagccctctcccagtgctttgaccttcccctgctgctatggagactcctaggagcagtgaccaggactgcagccagccaggcccgtgttattaacagggctggctccgtgggccttcagtattagtgtatttataaacaaccccaaacactgaaaccactgtttggttttgttcgcttttattaaaaattatatggactttagaagaaaacaacaaactgtcagaaaaataggcatcttttttttttttaacccaaataagcctgtgtttagtctataatgggagagttcttataataagcatagcaactcatggctcagcactttcccatggagtaggtagcaagtattgcttattcgcttatgagataacctttacatttaatcacttgtccattcaatgaatatttatgaagctcttaccatgagacaggcaccgggctaggagctgggaatattgcagtgaacaagacaggcacattccctgccttcctagaacttagagtctcacggggaaaatggacacataagcaggtaatcaaaataaagtgcgttgagtgtgaaaagtttgggatgctatgggagcatggcagaggcccaagagaggctccagtttctttacatgaattgccaagtgtatcgacctgaagacactgtacctcctgtctttgtgcctagaccagggtagaatggtcctaagagttagaggctggtctcagttattcttggacataagacttttctggttggcttgagctttaggccttacagaggagccagagacttgtctgggtagtgccataggtgtcatgctaaagccaccttgtccccactggccttggagctagtcagactcagagcctcccaagagcactgggaatgggagcaatcccttcctgctcacggactggcaggtcttggcccagggattcacctatgcaaatagtatatccttgagccaccagtagtttttacctgctcagctttctcctgttctccttcttggagtttcctttcccaagaaaacagactggatcttctgcttctccaaacccatccctctgaggcagggctgagaagaccatgttgctctatgaaagggctagtttaccagtcaggggactctgcttctgtactctctctccctttacctggtgccgaaagaccatcctcaattagggctgacaaggggcacccgttgggctacatttatcctccttattcttaagaagctacagcttttacttgctgtacagcatctaacaaaataagactgtgttagcttatcccagccccaagttttctgtagtggaggctgaaaacttcaggggaaagctgtctggagtcagatgtggagagtctaggagtcccctgtttgccagggcctaaggtgggaagtggagcaagggcagggataatttgtaggcattcaagctagaattattgccaagataggtggcttcagccacctctttgtacagaagagactgaagcacagagaagtggcttttgggaggatacaatggcatagagtagagagagcctagggcgaaagttctcaaccctggccacactttaaaattgctggaaggcatttaaaaagaagccccatggccagggctcatccagaggagttaataggattctgaagttgggccctggtcagtctcaaagtgattcaaacagcaggcagaatggagaaccactggacagcctggttggcagcctctgcacttcctgggttcagatctctctcagctagtatggtacttgggcagttcacctgtcctaggtaaacctcagcttccttctcaataaaatgaggttgctaatcatatctatttggtaagattatttttgaggattaaacaagaaaatacaaataaagtacctgggacatatcaagcacttaataaatacaaatcactgactttgttatttggtaatgacagaacaggactagacttcaggtctccgatttccaggcaatgctctttctaccaggaggatttatcaaggcttataatgaccaattcagtgggaaatggggtgctccatctttaaaataattacctttattcaaaaagacatgaatgacttcatttcttagttcggtgtctcctggttgaaatcattcatatatttgttcatttgtttgttctttgatttgacaaacatttcctgagtgtcttattaggtgccaagtacttatcaggtcccgagtactgtcaaacaacagtactcagtacaacaaaatacatcagtacaacaaaataaatacagaccctgccttccaggagcttaaagtttaatggaggagatacactaaaactaactattgtacaatgtatcaatgtattgattgtgacaatgggtttgtttaaaacatttttctttttcttttttttttgagacgaagttttactcttgttgcccaggctggagtgcaatggcacgattttggctcactgcaacctcctcctcccggggtcaagcaattctcctgcctcagcctctcgagtagttgggattacaggtgctgccaccacgcctggctaattttttgtatttttagtagagacagggtttcaccatgttggccaggctggtctcaaactcctgatctcaggtgatccgctcctctcagcctcccaaagtgctgagattacaggcgtgagccaccatgcccatctgtttaaaacatttctgagaacagtacctgatctaccaggcaatctgggtcaccaaaatcctaatatagttttggtattacctaaggtgccagacactggctttacccacagacattctgatttaattgatgtaggacgtggcctgggcattgagtttctttaaagctcccaggtaattataatgtgcctccaagtttgggaagcactggtttagaagcttcctgttccttaaggatatagccaactctggaaaaacaggctggcgctgggtggttaggagtcttctgggaccacgtttggactttgggaatttggagtttattctctaggcaatgaagtacaatgaaaagtctttaaaaggggaagtgacatcaaagtttcagaaaggtaattctggctacaatttagaaaattggaaaggctggacacagggtaattgttaggaggaagagatgacaccgagggcctacatgagactgggatggtggcactctgatgctaggtagcagcggaaaccctggcacacgggtggaaaaagagtaagcaactaaaaatgttctgcttctgctggttttcagctttgaaatttaattgtggcctcgttagtaatcatataaagaattccgttagtactttttagcttggctgtaaatggggacagccccttcaagaacgctcaagcatttatgggtttcagaatgatacaagataactgatcacccttaaaaaataaaagaactcagttagcttttacagctacccagttaattttggtaatgtagatcattaagcttccagatagagtttttcacagggagtgaggggagaagagatggtctggctacttaggatccaattacctggataattgccagatacccactaaacatggtgatgtaagcatggtttcagtcaatgtatcttttttctgttttttttttttctgacctaatgcctctactgataaaaatatttttactattattggttctgtggaactagtatgactgtgatagtgagaggactgcattccatttgccttgtgctccatcagagtcagctgtcggtgtgtcctcatgccagactcattgtaattaggaaggagacagaagaggcaagaagagcccagcgggaggctcccattttggcttgaaggcagtagcaccacaaattagaaaaaccattgcttgccttctacacggactcaacacaatactattgtgtctaccaatgggaggttctgaatatttttttaaaacctttgaaaacataaaaaccattcttagctcaagggacacaggaaaacaggccacaggccagaggttgcagacgcgtggtctaaacaattaacagaacaataaatcaagcccggatatgtcacatttgctgacctccctgttgtaaatactctcacaatgacttgattcgagaatgtccacgtaaacactgctgcgaggggagctagggagagttgagcagtggtttaccgtggtgtgctctttccaccacgcggatagcataggctgacatgtatgataagcaaccttgagagcaaagggaatggtaaaatgtggtaaaataattaggaaggaaggagtttttgagtatttattctctttgtttctaatataatttatttagttgtaagttcacataattcggtttttatactggccatgttgaacaatcggctggcaaaatttctgaaaatttaacaatattctctcacaaactagtacaagctggctccagtacaccacggctggagaggggaagctagaatgttgagaggcagtcaggatgaaagcaacagagcaaggaaagctgaagtttatggctgtggacgagcgcttcctccatcagctgagatggagccatgcgtgggcgttgcacagggcagcagccaatgatgggacggagctcattcaggccctctgtcttaataagcacaactcaactaatttgggaagaaaactcagttcagttggccagtacctggcagggacaggtagcttgacttaatatatagtaaatctaattataaaaatatagtactgtgctcaaaatttacatgtgagtagaatgatcgtgatgaaacagaagacagaacttttcccttacgataacattggattttctttcctaacctagctctcctacaaacatgcaaataaactgaaccagctaaagaagtggtcccaaggttttaataaaaaaaacatttaacccttccctaaatattatctaatgagggagcaaaatgtgtcactctcccttaacagatgggattctcatggctgctgttaaaggggaaaaaggagaaaccaaactgggtgactctctgagttacatctttggctctgaactcggtgagtctatggtttgataggttggcagggcaaagggaaaaacagagttggagctgactgaggattagaaatggaatctggggctgggtacagtggctcacacctgtaatcctgaccctttgggaggttgaggtgggaggatcatttgagcccagaagttcaagaccagcctgggcaacatagtgagatcccatcactacaaaaaatttttaaaaagtagctgggtgttgtggcacgtgcctgtagtcccagccactcaggaggctgaggcagatcacttgagcccaggagtgcaaggctgcagtgagcaatgattacgccactgcactctagcctaggccacaaagcaagaccctgtatctaaaataaacataacaaagaaagaaaagaaagggagggagggagggagggaggaaggaaggaaggaaggaaaagaaaggaaggaaggaaagaaggaaggaaggaaggaaagaaaagaaagagagagagaaagaaagagaaggaaagaaagaagaaagaaaaagaaagaaagaaaaagaaaatctagatggcttctaatgtaacatggtatttttgtgagaggatactgttaactatagcaatcatttgatttgctcacagattgatttagtttttagtgtccataatatgttaagtatttttaaatatgaaatatgtacctacatgtatttaatatttaccacttaattgaatcctgaagatatcagtggtagatggtttatgtttctgtttatttctcatgtttttaaactttctgcagggaggaaccatttgttaaatttctttttatgtttcttactatgcagcattgcaccatgaatatggagagtgagctttaaaatagtatgaaagacaaatgtttaaaggtatacatttctttcagagaactttttctctctctttctctctctgacagtgtgtgtgtatctcctgtgtctctctttccctctctcacatgcacacataagtgcacacacacacttctcttggaaactgaaggaggcaagaatatgatgccattaacaaatgctctttggtggacagcaataataacaactgctaactttcactgaggactacttatgtgccagataccatgtgaagcgctttgcttgtattagatcatcgaaacctcagaaaaactctataaagtgggtgctaatattttctagatttttcagatacaatactgaggatcagggagattgaataagttgtccagtgtcacccctggtagctgagagagctggtttggatgcctagggctgtttgtctccaaacctgtgccttgcacccttagctctggttcctcccctctcatgtcatgtaatcagcacaaatttcctgaagtaaggctgcatgcatataacaagaataaaggaataaaaatagaggatgccgtggaatgggagaaagtggactacttacggcagcagaggagacagtaggaaaggagaactctagatgctgtaaagcttcctgggactataagtacacttggctacaacaaaatggttgagcaggaaagaagggaagacagaagggctgatttggtggagggccatgggaggaataaaattagacatcatagctacagaatagaagcactgaaattgcaccaaatccatagactctcaggagtggaggagatttgaacgccatctgcctaatacataaatttgctctgcatcttgacaaggtggtggttcagcctccttgaatgcccttggccatgaagaactcattagctcctctcaacagatggtgaattagaaagttcttccctgtatggaacccatatttgcctaccagtaacttctgctcagtggccaggaactgacttcttggggccatacatgaaaagtctttcatagaatagtttccagggtaagtaggaaaatatctacacgtcaactatttttccctaatggtaaaattatttctggatactgcgttcacaaatgcttcctaatcactaattatcactcagtacatttcttaatcaactgcctttttgctaggtaataataatagttgataataaccaactgcaaatagctttgcatagatcattttttatgttgtcatttttatcttacagttgaggaagctgaggctcagagagcttaaataacttgctcagggtcacctacactataggcagagcagtcagaatttgctacaggtaatttaaacacagagatagagcactatagtcaatttggtgctgctataccagaaacccgagactgggtaatttataaagacactcatttttgccgggcactatggctcacacctgtaatcccagcactttggggggctgaggtgggtggatcacctgaggtcaggagtttgagaccagcctggccaacatggtgaaaccccgtctctactaaaaatactaaaaataagcagggcgtagtggtaggcacctgtaattccagctactcaggaggctgagacaggagaatcgcttgaacccgggaggtggaggttgcagtgagctgagatcacaccattgcactccagcctgggcaacaagagagaaactccatctaaaaaaaaaaagacatcttttctctcacagttctggaggctgggaagtccaagatctaggcgccagcatctggtgaaggctttcttactgcttctcacatggcagaaggcaagagagagatatgcaagtccttttcatggtggtgttaatccactcatgagagtaaagcctttgcaagctaaacacctctaaaaggctccacctcccaacattattgcattgggggttaagtttccaacacatacgtttcgggggacacagtcagactatcgcaagtacagcaggtctttgaatacatttattgtgttcaacaccttttcattatgacattgatgggaagaaaaaatggattcccagccagggccactgtctaggtggagttggcaagttctccccacatctgtatgggttttcttagcctttcctgtttcctcccacatcccaaagctgtgcacttaggtgaactgctgtattgacagggtcccagcatgagtgagcgtgggtgtgtgtgcgagtgctctatgtgatggaatggcctcctgtccaggattggatcctgctgtgcacactgagctgccaggacaggctctggccacctgagttcaggggaaccggaatacttgggtaaataattatctcatttctgtaatctttcttaaatgtatgtatagctcacatttgtttcaatgtttagtattagaagtgttttggtctttatttagaaatttggggttttgttttggtttggtaatgtttttgtgaccagaaagatgccctaaggaactttttttttttttttttgagacagagtctcaccctcgggggagtgcagtggcacagtcataacttggacctctgggtccaagtggtcctcctgcctcagcctcctgagtagctgggactacaggtgcatgtgactacacccagctaatttttgtattttttgtagagaagggggtctctctatgttgtccagtctggtctcaaactcctgggctcaaatgatcctcccgcctcagcctcccaaagtgttgagattacaggcatgagccacgtcacccagccttaactcttgttcgtatccattagcctacggtaaaatgggttttgttataccaattttgtaatacccttatatcatcatttcacttaaagtgacaattcctgagaacctatcagtggcattaagtgaagacttattgtacttaaataaatcattcattccacctggtataaaaagagaatgctgtggaaggtagagtctacccaggtttagctttgagaacgtgcagcttgtacagtctcccactgagaagggctctgagcctggttttatactctgctgtcacagccttgaaattcttaataagttttgaacagggagccctgtattttcattctgcactgagccccccaaattattaacttgttctgggtctgccattaaaaacgaaagaaaacagtcaagctgacaaatagaacacctgctttggtggtggtgcatcgagtgttctgtcgttctgtaggttcatatgttggagtgaactttagaacccattctctattctgtggcttctggtcttactgccctggacagcctcagtggtcagggatggagtgtagggtgtggagagtggcttcctttcttgtatatttaatgccatgcgtggagaagggctgagttctggcaggaatgcttttacatttttggcttttatcactttctactcctcagacactgtgtctcctgtcacaggaaatttatgggtacattttagtagttgacaggaacaacgagcctccaggatttccccaggagaagcttccacctgccgagtgagaacttcctcctattggctaatgtggaagctctgggctctcctcattatttcctcagcctgtcataaatgccaggaatgcaggtttcacaaaagcaggcagaggtgcgctgttagtaactgttccaggacaagtcatttgggagaggtacttactgtgcttcttggatgtctgcttccagtcatcttagtaagtccagtttgacaaaaatgtgcctttctaagtaaatgcagctcacagcttatggttgccaatgaaaaataaaaaggacagatgtaacatggaagaatgcatagctacccaacaccttcttcagaacaccagggcctgatattatgttttgctgcttaatagacttcattcagattatgaatgccttcaaagtggcagtaagatatcttgaaaagagcactgcaccgggagtcaggaaacctgggtttccacctagtttaatcttcccagattaaggggaggagttgaattaggcaatagctaagccctgcacttagtacccagtgcagacattgtaggaggctccctcttttgggaattgacagatgttgagcttgggtttccttctcttggctcaaagtgaacaggcttttaatcaatccagagatatttacctagatcttttcatttactgcactgcaagccctgtggcagaatgatatacaggaaaacctgaggctcattatgagaaaattgcataaggggcttctctcctgacttccacgtatggcccaggaatcttggttctgactgtcaggccagctccacctgggccaggtatttatagatgacatccttagatggggaacacagagctagctgctataatagaaacccaaaataacagtgaatttaaggggggtagacatttatttctctctcaagcaatccagggtgtctccatgtcagactcccaggccccttctgtgttgttgctcctgcccacctagagtgttgccctccctgcatggcccatgatggcttcccactgtgttcacagtccaggcagcaggatggaagaaggggagtcaaagccaggttgcacccatctcttttccctctcagcccaacaaccagaactcagtccactgaaaggtaggaaatgcagtctttgttctgggcagccatgtgggagagtggatactggcagacaagtagcaggttctgacatgtggcctgtgtcttgggatttgattaagatgaaccaaagggcctgttgagagcatctgcactctgacctgtcaggagatctctatacactgtaggccacgaacttatatgcaacaaaccacgaagaccaaagcaggctgtggcaccaatcacccatccctcctccaaggagctggtgcagaccctcagctggtgtggccatggctgtggtctctgtgctagtccagtctgggtcttctctgactatcctgcactgttcttgtttggattgctctggagtgccaacttttcttcacagttcttctgattaggtactaaacttcatttatgcatttgtcacagtggaggctccaggcacttatttctggggaaggcaggcttagccttccccacggcctctgcaaagtgctgctctcagttcccttaccctgcgttctctgtctctttgtgcaattctgtggtcgtagtgaaggcgagggggccccttctagtgggaagggtcacttccaacttagattcagactggaaagatgacctccagctgtgcagagacatgttccatggttctgcgttccacagaacatctggaagagctgattccaagcggtggtgtctcagcacagctggggcagtgctgtctgccccctgccatggttgacatccattaggtgagtaccctgggtgttgtggtgtgtgttagagactctagaggtgaatgtggtggtcaccttttcccgttccagctctgcactctctgcagagttgagggccagacaccttcttgttgaggacttagtttactctaagcctccaaaatggttctgggcccattttacttttagcctcccaacacagtttgggccgtcctgttttcctttattctctcacatctcagcctcccaaaatgctgttccatcttctgtcttctgactcaaatcctcttcatcctttgaagactccaataactcctcttggagaagctttcacctaaaataccagccttgggatttttattaccttgtcaattctccccaaatttctttcactggccgagcagagccattaccaatctctattgttcagtatttaacttcacatatttttgtcctcttctcaggttttaaactcctgacttgttttattcatgcatttatcagttatttactaggatttgctaggcacagagcagacaaagacaaataattcccctgtgtagcacttcgctagggtaaccaaggggggaagacatttactggaaacaataacagaacaaattattaccttactagtagacatatgtgcaaaagcctttgaaagaccagaagaaagccaactgcctggcaatgtcggaaagtttcatgggggagctggcattcttattggcctattcagtggtggatggatggaaacagttgctggctggaagaagtatgagtataaatgatcaacaatttgaagaaggtgagagttggaggtctatttatttgggtgggagaaaaggatacaaaagagaaggatggatgaatagaagataaagctgaaaagctgagttgggcaagatgggcaagtacttattggctctgctaaagcttttggattttcctgttggtaacggggagccttgaaaattcttcgggagggaaggtggatggtcccatctgtgtattagaatgatgaggttggatttggagggaaaaattgattggggttgaggagtgagcctcaagtcagatggatcagttagatacaaatttctgccagacaatgacaccagcaaaggtgagaggtgaggagagctctgaattattagcagtggcaatgggtaggaatgaatgaagggaacacatttaagagacactgaaaatgagtaattggatgcgtgggaagttgcagatgctggaagacttcactctgtataaggcaatgtctttttttattcaataaatattggcttttttacactgtgtacaaatggtgtatgcttttctgaacatttgggttttgacacaaacttgtaagactgaaaccatgtgaatattcttcttaaaaaatggattgtaaagatttcatgtgagagtttactgtgtacaagactttgcagtgttgattttcagtctagctggtggtcagattcttttcttatgaagtactattggggaaattttgaggagtacacagtatacattcttggagtacaaaatcaaaatgtgtaccctgttatgttttaaaagaactaaaactacaaaacgatgcttttccttcaggttttgtgggttgaaaaaaaagttagtggagaaatagctttctaattctttcttgccatttcccaaagaaagatactgtgatatttcattaaattaaaatggttatttttttgtttattgtcatcaggctagtaagccagatgatgctggggagcaggggtgtaaagaaaaggaaaatgtttcctggtttaaactctcttccagtgctaaacaagtgctttgccctttgggtggcatataccacccaaatggcagagcaagggggtttaggagaatgtcttttcctttttgcctggtgttgcccataactacataattgtttcttggttaattggttcagatgctacattgtttccaaaggagatcaatctttcttctctccatctctctccttctgtcttccccccatttgttaagctcctttgctttaatgcttaaatgcttaacagtcttatctgctgatccccgcagctcctagatactgaaaataaattatctttatgctgcggctgctattaatatattcctgtttgtcttggcctctgagttatggggagctgtctgccttgaacactgcatcataacaattgtataacctcttccaagcactgcagcaaacttaaatttataaatgcctatgaagtgagaggagagaatggaattgacttgagcgtgggcatttaaagcggaaagtcccttccctggaggctcactctgatctttccagagtgagcatgagggactcactctctccctgacactttttgtccaattattcattgaccaagcttaatgatggggaccagaggaaatatcagtatgaagttttatgaagaattaagtagtactactttgatcaatgtaaaactctaataaataacccagcttagtaattgtagagctatttagagaaaacacacagattgagaattgagcagcttgtctcccaagaggggcccactgggctggtagcatctagcagttaagagggggctgtgtttaggttttggacatccttatccgtccttggtatgatcccctcatgcttcatacctgaaaccttcgcctcctctgcacaaagccatcaatccaaacaaatgtttttgagcaaagtgagcagaatattataagttttcccacagtgttaaagaatgcctaaggatgcagtatttgaatttaaggtttttaggttttattttcaaaagaaactttagaggttttcaaattgtattccacagagttacaagggttccaagacagtgtctcaggagctgcttggggcatggagagcgggtctgcatcctccctcccccatcttgagccagaacaaccccatgcttgtgtattgggtttctaagtgaggcttaatctgaagacagttacattgattaaatcattggaaaactattgatctagtccaacttctcattttatagaggaggatgctgagggccagagagttttataatctgctcaaagtcacaataccagtgaccaagatggatctagaatacagatcttctatcagtccaatgttcttttattatcctatttactattgaattcctccttttatccaggacaagcatggtcctatcagcaccaacgttagaactaaaataaaatacaaaataaaatggatcctgtctatggagaggctgtgacacagagaggttaagcacgtagactctggacctagacttcctgggatcaaatctctactccaccgagtatttcctgtatgatgcagggaatatttctgtatgatgcagggaaccttgtataagttacttaccttcctgtagctctgttttctcgattgtaaaaggctgtgatgatgatgaaataaaccagtgcatatacaaatactgagaacagtgtgtggcaagtagtgaataataaacattagtttttatttaaaagttggaatcatcagtctttctctaagtttccgttagatactctgtagtgtgtcagtccttctgccttctgtgtttggcgctgaggatgaccgtggtcatggatgtgtgttctctcatgtctgttaaaaccgttctcccagaggtaggaggagtaataggatcatagaccatttggactggaggcatgtcttatgttacaagtacctgagtgagaactgaggccccatgagtggaaatgacttgctcagtaatcttaaggggctttttccaaaagggcagggggcagggaaggagagactcctgacacagtcctgggaacctgcattctatcggaaagccagttgtcattcgtggggccaatatgttgatgctgcatttataaatttttaaaaattgaggtgtgattcatttcacataaaattaacctgtgtacaatgtgaaatccagagctatgtaacacatccgcaatatacaccatcaccactaactttttcattagtcccgaaggaaaccctgtacccattaagaagacactccctattcccgcctcacccagggccctggcagccaccgctctgctttctgtctccgtggatttacctattctgtatttttcacagaaatggaatcatgcactaggtgaactttagtgtctggcttctttcacttagcataatgttttcgaggttcatccacattgtagcataaatcaatatttcattcctttttatggcttttacgttgcactttggttaaagaattttgttgcctttgtctctcaccactcccgaagtgaggctaactgactgtgacacagttttctgtttctttccaccccacaacttggtcattagtaaggggctaacactgtggttctattatttacagaaaacttgtttctggtttctcgggtcaggagaccaacagcagagaaagtctagctgctgctatgctggtgggacctgctctgttaggttccctgcctgtcactgctcttgtgcccaggtgtttgtgagggcatgaagaaggaagggacttcaagggctgggcgatttggccccaccatgatacctgggtgttgcacagagcccacatggcagtggagaggctatctcttatcagcacctttgctgtcagcttcttgtcacaacctcaagcctgacaggggaaccacactgataggtgggccctctgggtcttggcaacaatgtcataacgcggattaccagagcaatatgtcacagtgtcattttgcaatgttgaggtgttccatttgttaatgaggtgaatttcttgtctataaacatgaacatctgaactgtagaggagagattaaaaaaataaaatcaccatattaatcaggcccaataattccttttttaagcttggatccaatgctgaggaatctctggcatccttccttggaatcaattacagtcaatttcttcacattttacatcagttaaaggaacattgtcaagataaaatcttgcccaacatagtttttttttttgttttaatttccttactctcataaaccaagaccttcttaggttactttgccaataatgaatttttagagccaaatccctggtttgtctttatttgggctgtgctgaggaagtagcatcttccttccccttggttcacatgttgcagtgggctgctccacggctctcagatgtgcccttggggctgcattttgtccacacaggggcctgtgttctagttccttaggtgcgtgtgaagttgtgtctgccttgctgatggggttatttgtgctaatctttctggagcccgggcacaggccacagcagggcagagatgcctggaaggggtcaggactgggtgccagcatcctcttgggccgtaaagttaggcaggcatgaggccacattccacaggcctgaaggagcagggagcttgggctcagggaacttagttgaggcagaaaggctcaaaagtcacctgaggtgaggcaggtggaagctggagacccagcaacaagttgggaacattacccatgagtttagttcataagacagaggcaagctttgtcctgacatctttgccttctcctttgtcctatgttaggcaagaactcacaggtgtgtgctgctagaaggcaagacaggtctctacaggttcaacttacccataattaaggatggacagcagcctagacctctcagtggtttcctaatgtgagttgctgacaatagattttgttcttttgtagtaaaggcacccagagacttgctgcctaagtgcccatgggcatccttggttcttgcctaccaggcagaccctctcctcctcatccgaattggagggtccaatcactctcttgggggtccaacctggattttgtctttctcagcattgtggtctcagtacggagaaaccaaaactcgtggcactcaagagcttgttcactcttctcttctccaaaccctctggtgtccaagtgagtttggactaagtgggaggccagattcattggcacacaagtggcagcacggtgaatggggggctgtgctgtgttcttcaggctcaaccttccagaagacaatgcgtgcctgtctcctctgctgcattccttgtcccatgtcttttgtttgaacaaaagaggattggataatgagtttcttttttatttccatccttattttctatggacatgaagcttgaaagccagtctccttgggtctctatctctctacctatcctactaccccttaccttagagtaaaggttctgaatgtaaaataaagttattggggagattttaaaattctgatgcccaggctgtatcccaaatcaaattcatggttggattttactatacagtaaggaatgctttgataccattttgaatgtagatggctcagtggctttctttggctttctccaagtcctgctcaatcctcctgagatgccccgagaatactggcctcctgagcaacagtggcaggatctcaggagagagagggcagctgtgggctgtgtcttttcatgagtatgcaatagtcacctttgtttattatttccccaccctggagacaaatgtgttgctctttctgtgtgagtgtgtgtgtgagtgtgtttgtgtgtgtgtgtgtgtgtgtctgtgtgtatgtgtttggaaggggtaagagcagtgtaaccacagctcccatccccatgctgcaaggtagagggaggaggggtggctcacacgtgagtgggagcacggcttgcggcagtctcggtaaccggagggggcgggcatgctctaagggagcaacttggaggagttcctgtggtcccaaacacccatccatctctgcttgagttccttcccagttttaggtgtcatatgagtgcttatatcagtataactcacatcagccttagtgccatggacagtccctaaagtgaacatcaatttctctgtcacctgccgtattttgggtgtaccctaggggcacttagcacacccggccaggaggctcaagcccatgcctgtggatggcacacatagagaatggactctgttgctcttgaaaaggattgttaaaaaatcaagttagcatcttgtttgtcaacgttaagacagttgatgtttcagaataattgacaagcatggaaatccactggaaacaggaatgttattagggccactgtgtttgtgagtgttcggatgtgaattaaaccaatccattacacttgtttgatgttcattggggctgcaatatttttatgcagaacccgtgaaaggagacacagttcagtggtgtttatgagtgaccttgtcttgtcctctgaattatggacaggcagctcagaacatcagcagctggagctaacaactgtgctgtgttttcttcatattccgtattcctgagatgctgctgccatctcgggcttagattttgcagtagagaacatgaatgcggcttttcaaatcagaaatatttatagaacgaggtcctgatttaacaacgctgaagcgctggtcctggaaataataacacaagtcaggaaagagaacctctctccctataaaacatccctccagtgcttgctttcgaggggacttctttgtgaaaaattaatgtttcccagtttgatcagaagggttttaaactgaaggtagggggtggtggagtaaaatgccaggtgagcctatgacactgacaggcagtgcctggttaggtgcagtgatgtagctaacccaccctgggggagttccgctggccattccacttccagaggggaggtgcttgattctccattccttgacgtacaaggaaccctgaggaaggtgtggacaggatgtcccagaacaagtgaagccagtctctgtgtccagctgggtcctctttctggccctgacacagatgcccccatgatgcccgccctctgcaggctcaagtccgcccatgtgctcggccaccacctggcctgcaagtctatcctgggatgctgagggggcagctctggcatccgacaccctggaacccaggacatggatcccattttctctccaaacccaggctatgtttacatcttcaaaacacataaggccgactgtcccttctttcctgaaaaatggagcttcatctccactcctctgggctatatgtctcctggagtctcagagtccttggggcttgggggcattgtgttcagagctttggacatgattcacagtataatcctaaggacaaagtttttctggcaacctcatgctaaaacatgagaaaacaacaacacaacaacaacaacaaaacaacaacaacatcccagctcgctctcatttaaaatcattccccaggtcaaatctccagcaaacatccctctagagaagtgagaataacatagtcaaaatgcccaggaacctcagcagatgcagctgccaataaagttaaagtaaatgtaggcaccgtgaatagatgtctagcattccaaatagaggtggtgagagtttgcctggccctggccatactgccctcgaagacagcttagtgctggcagcatgttccgagagaagcactgacagagaaagacagaggagcatggaagaggatgggagagtggctcatgttctggcctagagaagcaaagattcgtagagaggggaggaagagaatacagtaactgtattgcaacatttattaataataataacgaccacatttttaacatctgctacaccttaggccgttggaacatactaactcattttaatcctcacagcaaccccatgaggtggatatctttattcctattatacagatgatgaaactgaggcttgaagagagcggttcagtgactcgcccaaactcacatgcttagtgtgggaaagttaagattttgccacatccaagtccttttagatccaaggccgtgttcctttttgtaagcctccctggtgtgtggaagggagtacactttctccgtgagatgccagataactgaaagagaactacagggaagatgtcagaggaacgagattccacgcaacctgataaagaacttgctcatggtcagagttgtccagagatgggatgaacaagcccagctggggctgcatttccatccctcggaggtctcaggcagaggctgaggtactaaggttgagggtactgtggtgggtatttaatactaagagtccctcttaatactttctgttttattactctaaagtaaacttccccagcacacagctcaaagagaaggccagtgtaatatgctggttcaatatccgacgactttgaaataattcgagggctaactggctcatctagtgtgatttaagctcgtagtttcccattcatgtatgtactcacttcttcaaaaaacacctttcggagtgcctccttcgtgccaggctctgcagatatagctgtgaataacagatagtccctgtgcaaggaatctatagatgggaatggggagagacaggcagacaggtgattttcattctgtgtgtaaatataattaggaaagtacaggatgctatgggacaccgaatccaactttgcgggacaggggaagaagccttaggagctggcgaggcgagggggtgaagaggagaaggaggtctgggcactggaagcggcacacgtggaaacggtaaaggccgacgccggttcagagccgcaaccgcgacagccccgtcgtccacctcaggtgccggcgccccctgctggtgcgcggagatgcgcggagaccgcaaggcccgggggcgtggcctcccctgcgccggcgcgtgtgcccgggccctccgcggggcgccggcgtctgcgccaaggcacgttctcctgctgctccagaactgccaccttccaagtcctgaaggaggccgttttcctgtcatttgcacctggccggagccattctggatgttttaaggaaacgagaaaaccattctttcctcttaccggatgatgtgcgatgtcatttggaaacaaagaagggctctgtttcttggagcccctgggttctgtctgcaagaggggcagtcatgaggcttgcaaggcagggagtgggtaggatggtgctacaagcggccgggaggtgatggggtgcagggaaatagacatttccatttcttcctcctcccttcttttctccccagaatctcctgtgcgaacctcttctgtgcagacaccttcccacccaacctcaacagagccctgtgggcctcccacgctgtgtaagtgcgcggactcatctgagtgccactaggggacacagcccagattcaagctgggatccccataatatgtgcacctgcagccaggtgtgcctatagaaccacaaatgcgacaggtgaggggatcatcttattattttcctacttccgaggcaggacggtacttaaaccatctcagacagatggttaactgtcctattttaaaatatctctggggaggacgatttcacaattccctgtggctgtctgttctagtatttaatcatgttcattaccagcgagttcttctttatgccggatctaaatctccaccgttgtgatttaagtctttttccttgagggtagacgctgtggctcttctgcttcaggggaggagaggattctggtgctaattttgcggtcttgtgaataagttatctcttgtaacaccttctttggggtttattttctttactggtaaatggggttggagggtgagttagggatggttcccaaggacttctcaaatgtcatagcttttagacaagtgctgcattggtatcgtgtgcaattcaatacttagtggaaataataacgctttgttgcattgaaaagcgtgtagctgaaatctgaaatgatgccacgtagacctagtccagaaagccatctatcccttagtgtctgagtgggccgtgggaaggaatgagcagtggagtgggctgggccactcacagctggaccttccagaagtcacttcagggtaggcgctctgatcatctattgcacagaaaaggggaatcaggctttgtgggtgctgccccagcctctagctctggagagctcagaaatgaacacccagcagagggcagttgtatgggacagtggattttcatcctccctcccctttcctatctttttttttgagacagagtcttgctttgtcacacaggctgtaggtgcgatgttggctcactgcaacctctgcctctcgggttcaagagattctcctgcctcagcctccccagtagctgcgattacaggcatgcgccaccacgcccggctaatttttgtctttttagtagagacagggtttcaccatgttggtcaggctggccttgaacccctgaccttgtgatctgccctcttcggcctcccaaagtgctgggattacaggcatgagccacggcgcccagcctcccctttcctatctttaaaaagcaaatgccctaggaagggttataccttaagtcattatcaggtaaccctttagtgaccagatgaggaaatgggctacagagtagctgcttagtcttgacactggaggggttagcacaggaggattcggggtaccctgggaggaaggtttgctaacagcaaaacaaaggctccacaccagcggcaagagaccaagttcactcatttccccttgttttcaaaaccttcttgtctgcttactttgctatgtatgtccttaggagctggttcttgctccaggtggcatgagttaccttgctttagggggcagtttttaggcaggattcattctaggcaaagttccaccagccaaagctctctgagcatcctgcctcatctatacataggagtaaacagagcttcagccaacgactggatcacatcatgagacggagtaatctgctatttacttgtattctcttacctcctcaagttgtttgagacagaaataaagacttccttgtttggtaggcatgggaggaattttaatcttctgcacatgtaaatgtgagattgtaggatttctcttgcctttattactggtatcatcaaacactgcattgggctcactgtccgctaacagcaattcttgtattattatttcagagttagctgtgagttaaagtatcttcgggccccacttggtcttgaaattgttaaaaggcattgggtacaccaaaaatgtccttgggcctctgaaggggagaaaagggtcagaatggtcccaactcagatgcaagtctcctgggaagggacgtgttccccactttgtgcaggtcaggcaggggtgcactgcagaactggtttccaccatcgtaccagtcatggaagggtttccatcagctcaggattgtaattgtgtcccactggaggaacagcacgaagttctgaagatacttgtgccttctatataaccctcacttctcagagcatggtctggggtagagcagcatcagcctcacctggaagcttataagaaatccagaatctcaggctctacccagatctactgaatcagaatctgtattttaaaaataaccccaggggattcttatgcacatttaagtttgaggccccctggtctagcccactggaaaacagagtccttcttggtggatttcgagtgtattgttctaggcaacgttgtaaagcaggtgaggcttctcttcgggaccaccgactctattttcaatattcttttctctcattaaagcttccttttctctgcatttcccttcactccctcccaaaagcacccagacaaaaccctactgacgaagactgtgcactcaacatagcccaggtccctgacatactggagaaaagagacatgattaaataattcctatgaagctgttagtgacttaggatttgcagggttctttctcatatggatattgcactctaaaatagggtacttaatgaatcactgtttaacctaaagattatatttcctttcatagaattcgagtcacggtggcactctgacagagattgcagatatctggggatagggtgacttttataatcactaataggatgctatgtgggtgactacttaatccgactatgtaacagactggacccccaagctttgggtgacccccaaaacttcccagctcagtaagccctcattattgctcacagacactgaattcttagtgctgcttctcagatacttctttcttatctttattattttgctatgtttggccacttaagatacagagtccagttttcaaaataaggaatggattttaggagagtttttgataagtcaaagaaacataaaagaagagaattgttgagatatgattcaggaactatttctggagatagctgaacccatgcttaatagggtgctagttttgccgggcagctttgacatgtgacaactgtttctccttttaatttccagttattgtagaaataaatctggcttacatggtatttctcctttttattgcttgacctgatgtttttttccccatgcaagtcacttcctagcaattcactccaatattacagcaacaccctgactgtcctgtgcccaggtatgttgacaggtgaaatcccttaacataaattttgtcaaaaaaaaaagcctgtaaaagacagatgctgggaagtggaaattgataaatccaggtgttacaaatgggacactgttaaatgcaaggattgcaaatgttatataagtaaacacaatgtccataggtaggaaattgcaaaagacaggtgctgtgaatattggtctatgaggccaacagacagccctttgcaaataacatgggccttttaatagacaaataagagctgaaactttcatgcagagttccaatcccctggtagaggatctttttggctaagtaactcactaaacaatgatgagaggacaagtgtaacaacctccctttaaactaatctccctgggtaacctgccagggagtttttccaggaacattagctaccagctcaagagcagcctttcatgtagatacttttatgagatgattgatagaagtagggcaggtctcttggtttcaaaatttctcttttaccagcctgtaatatgcctgaaattgcaccattagcaatatattttttggattaattctctaccaccaacaggatagatagagcaatcattcatttattcatcagatgtttattaagcacttactgtgagccaagtactattcttggtaaaggaaattcaaaggtaagtacaacatcgttcttgcccttgagatgttgagagtctagttgggaatacaggaggtaaacaaataactacagcaatataactagtgctttgatagagatagcggtaggctctatgggaacacagaggaagaagaacttgacccgggactcttgagctgagtcttaaaggatgagtaggagtttgcacacagatgcaaaggatggaggtctgcagtttgggtgtgggaggggagaaggaataagggatgattttggaccattgggccataggggtgagcatccctgtgcctgagctgggattacagttcttgggttcctgtggggcatcatgtcagtgttggctgcctatatatgtagagagagtgcttctggagatggggatgggggtaggatttatgcaaagaggagatggaggatggcagagaccaatgcatctacttggatgccatggaaagcctgacggcactagatttttctttcaagtcatcacctcttcattcaacttgctttcccatccaggtacttttctacccagctgtggcacacccatgacttcagcagggagagagttaagactttgaggatggacagcaaaactccatctattttttttttgttcgtttgtttctgtttttaacattcatgatttgggtattgtagaaactatcaaagatggcttaaatgaggtctttgtgtgataggaaatgttcttagctctgtgcttcccaaactcttttaacattgaactgctctctgcagaacatccatcttggtgagccttcactaaatgcatagaagtgacagcaaataatgtagctgatctaactacctcccctataggatttactttcagagttttaagggaaattttcaagcagaaaatggttacatggataaaattgttgagatttaattagacttttataagaaatgtgagagaattttgttatcaaagtctaagcggtaggctgggtgatgtggagatgtcgaataccttgactttcacttctgaagaactggttttaagcatcctcttttcaaatagacaattaattcttacataagagatggtgaccaactagtctctttttccaaagaggaataaaagacaaaaagaaaatggttggaattgtggttaatgatattcaggttggaccaagaaagattattgggtgcttcaatggattgtcaaagatgacagaaaattccatctttgtggtaataagtaccctgctatgtctatacttttccttgacaagctttttcatactaacatttcactttgtactcagaatccattccttgaaagttccttggtttatggttgagggaactgatactcaaagaacattaagagacctggctaaagttacacagccaagtggtaatagatacaagctttaaactcagagttctttctaatacctgacacttttgtcttctaggctgtaaatgaaaatacagcagaatcagatctgtccaataaatcctgattgaaggccagaactgaaagtatttcttctgaggctgagaaaaattccatctcaaacattgaaagggtagaaataggcagtgaagtcctagtgcctgctctgtttggcctttctgggttaaaaacatacttaaaattgagtgactctgttgtggaataaaatccaaacaatctgggttgaaaaagactgcttaggggtgtgtgggtcacagtgatgctaagggtattcttttttttttttttttttttttttgagacggagtcttgctgtttcgcccaggccagagtgcagtggcgctgtcttggctcactgcaagctctgcctcccaggttcatgccattctcccgcctcagcctcccgagtagctgggactacaggcgcttgccaccgcgtccggctaattttttgtatttttagtagagacggggtttcaccatgttcgccaggatggtctcgatctcctgacctcgtgatctgcccgcctcggcctcccaaagtgctgggattacaggcatgagccactgcgcccggcccgctaagggtattcttgatatccgctgggataatgtgaccacaggacaccttgcttgctttctccaagaatctcaagaagactacaaaccccaagaagggaggcatcttgttcaagatcatgttggggatagaagacagagtgagaatgagaaagcagagatgttcatttgttttatgaacatttacttatctgccaaggtctgtagccctggccttccctgtgaagagcagcagcctgaaccaacgttcagtggccggggctgccgagccaggaccttacggggctgcagcctgtgctgacccagggcctccacagtgctttgcttgcagatccccccaaaagagttgtgaaaaagtctgtgcctcatcatgcgttttcaagttgacatcccaaaagtttcatgataattttaaatggttgtaaatgatgcaatttctggtgctttataaatcttgacagtttaacataaaattgttgcattactcttttaaagtttccaataaaatataaacactgcagctatttgataccttctattatgtattcaaagatatataaaagccctgtttttaacagtcaaagatttttcatcatttctttttctccttggatacatatttacattccatttccttcttaaaattttaccctaatacgatatatttttatgctggaaagtcttttactgatcacgctaccatattactctgcaacaaaaagaggcttataaattaaaatttaaaatttaaaaattttataaacataaggctttgtgttatacgcttcttttggattgaattttcatcacagatactattaatgtacaactgagcaaaacaacatatttacattatgagcttttcgaggtaattcttaatataaaatgtaccagaaataatatattttacatgatcgaagggatatgttgtccgattcaagaggctttctagacacctgtatttcaaatgtctccttgtctgggcaccagtatttcctagatttccttgtttggtgtcctgggggcattcacaccacagggatatggacctggaaggatgcagggtgaatgacaggtgtgcttctctgctgaagtgtaggataaggatgcccctttgagagacaggagaagcggcaggtgggctccaggctctgccccgggttgtcctccggtgaacgtgaagactgagcacatatgaaagttgagggtctggaaatgaattctattaaatcatgacttgtacacaagtttcaagatgtcctacactactccaatcactttcgaaggccacttgggaaattgttagcatgttcttgattcatccacataagaatagtttgcataagctattcaatataaatacaagcataaatatgcctgtactttgagaaatatgcctgtactttaagaggaagacgtgttttggggtgtttcatctggataatcagttgcaatagacactgtcacccgtttatctggaacaaatagaactattatgtgctacataaattataaatgattgcaatattacttcatcgcaagatcattatggttacagcctgccctcctatgaattagaatcattgactgatattatgctgattggaacagaagtcaattcaatgcatcagaacttggcaaatccctaaccacacatggttcacacacatgcggttgttgatttattccagcctgttagtcaagatagttaacatactatggtaatattttccacattcctggagcttaatataatacaaatctatttcttgatcatactatatccagagggggctagtgagaggttctggttcacaaagtcactcagggactcagggttgatggatgcttctctatcttgcagctgtaccatctggataatgtggcaggagaggggagagacagaagaattgaaacaggtcttccatctcctcaacctggaggtgacacagtcacttctgcttacatttcattcgtcaggactagtccaatagttgtgtccaaatgcagaatggctgagaagctcactctgccatgtgccccagaggagaagaaaacagaatattcttttttttttttttttttttttttgagacagagtctcgctctgtcgcccaggccggactgcggactgcagtggcgcaatctcggctcactgcaagctccgcttcccgggttcacgccattctcctgcctcagcctccccagtagctgggactacaggcgcccgccattgcgcccggctaattttttgtatttttagtagagacggggtttcaccttgttagccaggatggtctcgatctcctgacctcatgatccacccgcctcggcctcccaaagtgctgggattacaggcgtgagccaccgcgcccggccaaaaacagaatattcttgctaactaaactatagtagaagttgatatgggtggcattggtcaattggtcattggttaaaaaaatgattaccaagagttagtgattaataataaaataatggggttatattcatcacaaaaaatcattatgtaagcaggaccgaacatgacaaaggcagaaaatttgaatctgctatgtaaagaggcaaaaatgtaaaccttgggagattgaaacttaccttcaagtatgactttgactgaaggaagacctatctagctggcagaggtacttcagctgggtcatacgaatacatgactggaagtgtcctgccatacttgacaactctgcccagctcttgtttccaccaggctccacttggccactaagtggaagtcattcggcaagttcatgagagtcactactgagaagatatccctttggttgccctcgtgactttgcctatttctagatgtattatggagcaatgacctctctagcagggcggtggtgattagttgtaacttccccgcccccaggtacttggaaaatggccgaatcaacaacttagagtgaactagccaagtgttaattagttatatggcattgaggtttaccgttccaggaatgtaaatatttggaattattcctatcagtgttatctatattcttttagatttcagggatgggaccgctgcaggttgacccaagggtatccctataaaagatccttggaatctacaattacaagagtgcatcatctttaaaaaagaggtttcagggaacaaatatccctttttgtctattgaggtggcctggtcccaaatgtcatatcaaggaaagggttacctgacctgtgtaagactaggaaccagaaatgttcctggctgcataaccctagtctcgcatgacttctgatactgtaggaaagcaagctggaaattaatgtgtggaattctaagagagatgcaagcaaagtgaccatttgggaaggaataatccagaatgcaaatacaaactgagccgtcatttattattcatccttgggtgagagggagaagaaccaggggtcagagagagaagacattacagattgaatgccagctgaaatatggaaggaaaggtgagtttgccaagagttatattagtagggggactgtgaatagaatgagggttgatggctgatttctgatggccaaataaatgtgtttactcttaggaccgtgttttgaaaatgacagagaacttagaatgcattcacagaagggtaaaaagagaagagagaacatttataaagctaattagaagaggaaggttctgaaagccctactgaaaagaacacttttcagcttcctttgagaagacattttctatctagctccattgaatacgtttgaactggcctggaacagttaagaaggtaaaggggttagggaggttgaggatcagaatggtctttggggtttaaagccaggtccacttctacccagctgagttggcttggccaggttactgaacctctccaagcattcaatttctctaattaaatagccgagggtgattgactgaaaggattgtttaagtgtaagaccaagttctgtgggaagaagcatcctccatagtgcagcaccttcgtcaccactcacttaagctctaacatatggcaataacttctgtattataagtgaagaaactgagcctcagtgagagaaagaggttgctaaagtttcaggaattagcaaatgttggacttgagattcaagtgaaaatgggtgaagaaacattcctgtaggttagggtagcgcagtgggttgaatagcagccgctcagaatgtaagtccatgtcctaatccccagagagtgtcagtgttagcttatcaggaaaaagggtctttgcagatgtaattaacttaagaattttgagatgaagacatcgtctgggattatctggggagccctaattccaatgacaggtgtccttgtaaaagccaagcagaaggagatctgactgccagaagatgaggaggcaaggtgaccatggagacagtgtgatgtggccacaagtcaaggaatgctgccagccagcagaagttggaaagggacaaagaaggggttctccctgagagccactgcaggcagcacaccctgctggattttcaacttctggcctcaaaactgtgagagaataaattgctgttgttttaaaacacccagctagtggtaatttgctatggcaaaaactgaatacatgtgggaacggctcgcactttgtgaaggcctttgagcacctaaaaaagtggacacaatagtggataggtctgagccttgactatgtggttccttctgggggtcagcaggtcacccagatgaaacaaactttctcagggccttaacaagtaatgaaggtacagctttggtgactgagcgcttcccttggtatcaacttctctttccaaagagcctcaggagatgaggccacacattcccattttgcagatgagcaaacagaagtccaagatagttacataattagcatgcaccactggcttgctgaggtagagggccatcatttgaattcacacatggtagatgaattctcccaccgggagagccagtccccaggatcaggccataaataacctcgctgcgttctgtctttgggggctaagcattgctgaaaatcacaaggctagtcatgttagtcatgttaccacaccttgttatcctaacaacttaggctgctgtagaataagcttgaattctcctcacactccgagtactctggcttccccttgggacggacgctggggctgagctgccaggagagttttccctaagtgtagtgtataacagcccagtgggttaggtgggatctggtccatcctatggcttctagataaacagacaggaggaaagatggagatgtgatggaagggagaactctgccagcagaggtttttaaatactaacataagttgtgaaggcctcagcgttattatgggtcttccaaaagaaggagaaaggccattctgcaccctcttcagctttgctctctgaaccgtgggttgggggatttcccccaaagccttcttctctcctccattctagttctagtgcctgaaatgttgcccacagtagcggccagtgcacggcctctgggtttgtgtagacttgggttcaaatcctgattctataatttgctgacaaagcaatcttccgcaagaaagttaacctcttagctactgttttgcacctgtacaatggtggtaagtctctttggcagggctgtggtgaattcagggcacatagtagatactcaacaaatctttttcacaggggtgaaggatgataacagctaacattaaatgagcacactgtgcaccccacacactttacttggactatttcatttcattctcacaaccaccctatggaggtaggtaccattattagcttcatattgtaaaaactgggtgttaagaggtaaagccaggtgtccacatgcccatagctcatagcaggcagaacctggctctgtgtctggcctgtctccaaagaccaggctcttcgctgtatttaaagtgcctatcatagcacctgatactcaccaggcatattaaatgatgataattagtatgaattcaacaaacatatatattgagggcaactatgtgccaggcactatttacccataaaaatatctaaacaagtaacctggtcacaggtgggagcactacactgttgcatcagccagctttggtcagggaagtggtaccaccgtgagtgatgtggaggaagggattgattgcagagattagaccttatccagttgtggaagctggtgaagaatctctagaaggctgctgcctctgcatctgaggatgggtgtgaagttgccgtaatgccaaaaggccggaggaaagcaggacatgatgtgggagagagtgaggccaaagtggagcccacaaggacaaataaaacccttgtttgcctttcaccacttccgatctcgaccatgaaacataaagctggaatcttgactacagagctggacacgtactttgcccaggcctcagagtagctgaaggaggagatctagcaggagctggaggagctgtgggctccaccatcagggtgagccagcaattcggtgacaatgagcgcatgctgctgcttcatgtccaccttccagaggctccacaaatacctgttgtggacaaccttaacgcagaaccacataaggaaggcaattctgggaaataggttccagcttagtgaagttgacctaatgcaaaaccaccacactgatgttcccatcgctggcctttgagaaggaacggttgtgcgtggccctatgtggagataaagaaggtaaggtgtcagaaggcacatttaagctgggctttctgactccactcttcctactctggcttgctaatcaactttacctggtttgaaatgcccacccttatatacaggcaattatgtggattagaaattaaggatgaaacatcttcccaaaaggtcactgttaagatttacccatcatcttggtgctcctagctctctacgaccaacacagagtggctgacacttcaaccaggcagcttggattgcaatgaggacaatgcaatgcatttgggctggaaacactgcacaggtaatttttgcaggtgggtggcagcatttagtgctgagtggctgttgtggtgggcagagggagagaaatagaagggacaccttgcagacttgatgggagacttattctgaagagattgattagcagtgttgtccctggctaggcagtggggggagggctctgtgtcaagaggtgtgtgtgtgctaagggaagaggaagagcctgcttggcaacctggcttttcaagccttggaccagacagggaagaagaagaagaagaagaaacatttacgtgtaatcccacctcccaaagacagctactgtcaacactttttttccccacctgccccagattgaggatactgtcaacattttggtgtgaaccctatttagtcttttccctagttcaaatataaacctgactttaaaaggaaaatgaaatcatagtgcctgtaatattttcgtgacttgtttttcttttaatgtaaatcatctttttccacgttactaatattcttccttaatattgttcatgtctatgtagaatttaactgtatgaatgcactctagttcatctatgcggtggttaagagcgtaggctctgaagactgctagggttcaaatcccaggtctttcaacatcaactggctgtgaaacatgggcaagtgagtaaacgtttctgtgctttggtttcctcaccggtaaaatgtggataaaagcaattccttcacagggttgtttggaggagcaaatgactttatgtatgtgaggcacttagaataatctctcagtgttattatttaaccaacatttttgttgaatatttagttcatttccaggttttcactcttacaaatatactgtaattaacaaattcagtgcactcttaattgcttccaaagaaaatatctgtggtcacatttaaaaatcttttccagagtgaatcatgcactcaacacaaattgagtgtccatatgtacaaggcattatgttatgcacaaagaataaacacagttctcttcttgaagacacctaaaatgtagtaaggaagaggagagaaaaaggctcatgcaaatataagcaaaatactatgcagaaagagggcacacatgaagacctatgggagattctttagctggagaatcaaatcattcaatgacagagaaatgcagactccctcctctgctcccaccacctcccaaatccccaaatcggaattcacaatggtctccttttgtcatgttgagaatttgttacctcgaaagagcacacccagggctgtgttccaaagttaaaagctgggatatgggcgtatactgcaagaccaaatatttaggaaatacctttttctggaaaggaaagaacacatttcacagctgaaaagagaagtgaaaaatgaaactaaagaagcgtggaggtaatatttacttgctagatttatacagtgcctacctttagaaaagctgggctataaatcctgcacgtgaccccctaacacacatacactctgttcccagtgacttggctctttgtgaattatctgcagcatattttgcaatcatttcaccctgttcatctccctgcagccctgcccccaccagctcacccacacttcacccctcagaagaatgagtaagataatagtagagactgagtttggtgtcagatatgcctgggctaagtccaggctccacatttactcagctgggtgaccctggacattgtaattcaagtctcgaagtctcagtttccatatctgtaaaatggggataatcatgacgataacacatagcttattggatcgcagtgaggattaaataagataaaggctgtaaagggcctatcacagtacctggcacagagcactcagtagtgttagctattattattattcctgcacttgtgtgtaaaggggatgcaaaccaattttactattcatttaaacaaattatcagctacagcagcctctgaaacacaggcctataatgcatcctaaagtaaatgcgaaatatttgaatttgtgtcatttctaattttctctattaagttgaaaattgagtatgaacacaccagaatggcaaagaggccagatttctcttgtaaccaacaaaattgagatcgctattaacattagaatgaagatgaccgaaacagcttaatacttctcccaggggcacttgcattttacactggggccagaaccactggacaaaggaaggaaacaggagtggtaaggtttcaggtaccaagggacggacagatgcattttcatagggggaattgcaacactcctgaaagtatctcaggcactcactcatttattcaatacatattatgtacttactatctgccagatactgctctaggcactggtgaacaaaatagatgagacacctgccttcatgggggttacattttagtggggggatacagacaataagcaataaagttaatgaataagtaaactatatagtatgttagacaggatttcagtaagagtaaggggagatagggagcgctgtgggggtctgtcagtactgaatcaggatgaggtcctggtgagcctcactgaacaggtgagatttgcggaaagccttgaagaagccgagggagtttgtgtttcaggcagtgggaatagctagagcaaaggccttacaatgtgcgtgtgtgttgaggggtcattcctggagtgtctggggcccagccaggaggctagtgtatcccgagtgagggggacagcagtaggagatgatgtaaggggatttgtactcagccattcctgtaggtcaccacaaggaccatggcttttactaagtgaaatgggtaaccatggatggttttgagcagaggagtgctgggatgtgatgttttaaatgggttactccgactgctgtattgagaaaataccagaggggagagggaaggtagaccagggggatcagccacaggagaaacctgggtgaaggatgctggttcagccccaggtggtggcagtgcaggaaatgagaagtggtcaggttctgaattcacctgaaggtagggtcaacaggatctcctgatggactagacgtggaatgatgagagaaaggagtcaagagtgactccaggattttgaactgagcaactagaagtatgggatggtcatcgactgcgatggggaaggctgtgtgaggaggagcaggctttgaagagatcaggaatccagtgtttggatgtattaggcttgaaatgtctatcagacggagtcagctgtagtctggaattcaggagagaggtctgggctggagatagacatttgatatagacagctgctgaaagccacgggaatggttagggtcacccagggaatgagggtggatgtggaggcgaggaggtcttatgtggaggcaggtagaggttttccccaagagggagttgtaggcccccctgaaagggatcacgaagccccactggaggggagcccggtcctgcagggggtgccgtggaacttgctgtggttgcagggagtgatggagggaagtgtttgcttctccgggaaggagaggtgctggatagattcctgccggagttgcagaaataattaagagaagtaggtaaggatatcctagtagaacacgtgctcggctgcctccaaggaattattaaacctgggtctaggaatctgttcagacatctgggcaccgctgcctcgcctaccaggctccgcctcgctgcccctcccgcttcccctcccctcctctatctgtcacttctacaaccgctctgattataattgatcaaacagaatcacggaatcacggctcatcttgccgttttgttcagtggcccgatccgaaacgagactctggtagtcgggcaaattgtattcctcctccttggaattccgctcacagaggccttcccggcgtggccggcccagcagggacgcgccgccgcagcggaggagagaacgcgggcggggggctgcaggccggcgcggggggcgcgacgccgccggcggggcgcgagggggtgtgtccgcgccgcggccaccgcggccaccgcggctggcgcccgggtgcgccgcgcgccccggcctccccgggggctcctcacgccgcccctcgcccgccggcggccggggcccgctccctttgacgtcatgcgggcggagggctcgctcgggcggcgctgccgcgggcgccgggagggggcccgacttcgggctccagtccgccgccgtgcgccccgcgccgtgcgcccggctccctgcgcgccgccgcagccacatctggaagcgttcagcgcgtctgcctccggcgcgccgggcgggcgggcgggcggcgcgggcaggggcgggcgcgggcgcggcggggctgggccggggggagtgagcgcggcgctctcgcgcgcccggtgtctccctctcgctgcctctgcagaaacagctcctgccagagcggcgctcggcgcggcgcggcgggcccggagcggcggcggcggctcttcctgcctccgcgcccaggagttgccggctccctttgacagcagagagccgggcaggggcctcaggaggactcgctgggagtgggcagaggcgcctcggcccctgccggcccaggcgggccccgcgcgccccccgcccctcctctccgcctcttctcgccctgcctctcccgatttattttttcaaatggtgtagccgccggaggtgcggtgctcagttcttggaaggggcccggatgtactgaggatgcgttacagtttcactcgaggaggcagtagtggaaaggagcagtttttggggtttgatgccataatgggaatcaggtaatcgtcggcggggaagaagaaacgctgcagaccacggcttcctcgaatcttgcgcgaaagccgccggcctcggaggagggattaatccagacccgccggggggtgttttcacatttcttcctcttcgtggctgctcctcctattaaaaccatttttggtccatggtcaatgagaatacgaggatgtacattccagaggaaaaccaccaaggtaaggctggaccccgccgcctcgccggggctccctgccttttccaccgggttcctgccctacccgcgctccccgcggccccggggccggtccctgcggagtggcccggggccgcgtccgcgaggggcgcctccgcctcgtcggagcgcccgggagcccggcgggaccggggcccgaaccgccgcgcgagacggagcggaaaattcccgcccctccccctccgggccccagcttctccagagcatgtgtttcctgtgaaattccaggcgaggggggaaaagttccccaagtggctgccgccgcctcgctttctcgcgtccgcctggagagcccggctgcctggccagccgcgcggggggcagagggcgccggcgccgcggagcccagaggcccggggtccctcgcccggctcggggcgcggctgggagcgcgcgcgcgcgcaccctgcgccggcagagcccggcgcccacggccgcccctggggcgccctcgcgctgcccggcgtccactctcgtccaggcgcccctgccctgggcggcgcgctccaggtggcgggtgggggcggcggtgcagatgtgaagcccagcgcgcccctctggttccccctctgtaggtccccttcttcctctctccctccctcctccgccgctcacctacacccacccacctctccactgctgttgaccccgagcgcgcccacgccgcgtgtgttctcattcgcacccacatgtgggctagcacctgaggatggaagcggcgaggagccgggcggtgtgtgggctttgctgtttcgtgtttgaaggagatcatgaaagggtgtgcctggctcacgcggctccatactattgcccagtgttttccgagcatctccatccttggccgcgagtgtcaccagctccccctgtgatggtgaaaggcagtcaggtaactccctacttcctggaaactttctccctcaccgctctccccccatattaacaagttgttttcttggacgttgcttagcatttaaggttttggggacggggggtgcagacagggtggtccagcggggctttctggcaacctccaggcatgacatctctttcttctcgccactgctctgtctctttgggtgtagtctctcccttttctctcccagttcccagagcctccctgtttgcactcttcctcttctcttcccctgaaagcctatctgtcactgctggtctctgttccttccctgggttcttcccagtgatcctctgaagaccagcctggtggaaggagttgtctccaggtctttttgtccagctttttccctctgtttgctcccagctccaccttttggggacagggccttcactctttagagccagaagctgccatccagcctgcctggtctccatctatcctgaaaccgattttggggccagtcttctctgctttccagcatgggtggcagcttggggattgtggcctcctttggaagaaagaatcttgtcaagggtcatgggttctagggtgagccagagctttggggtcacaagggcagtatccatgtttggatttctctactgttgaccccatccctcacctgatcccctctcccttctgtagctgatgggctagtgaatggtttaggagggaaggagtgagacacaaaagagggtggtatttgtgaagagtggggatgcaagatgactcccctccaggttctgagactgcgtgctttacccacctcctcagtctaagcagcattgaagaggagagctctgtagtattgccctaagtatcactgtcaatggcaatgtactgtggtaataatagtgattattcaccttattcacaggatgataatcttaactagtttacaaggtctcctcttagtgcaggataaaccccttctgaacccatttccttactctggttgttttctttggcccctttgcctctcagcatctccctgctgtatgctgggagcagacattaaaagtaggagtgccaaccccagagaggttcctgagaaaggtagaggggaagggagcaagggagccagcggctgagagctctacctttccagcaacatgccagcaaacgctatggcaacctgaattccagttctctcccttgaagctgcagtgattatataattcatgggagcagttttgcctccatttctagatgcggttcccaggtggaagagcaccaagatccctgtctcccctctactctccatcttctcttctttagttggttggcattgccgaggttgttggggtaggagaggggaggagggtggtggaggtgggaagggcagacctagaacagaatgaatattgacaaggaagaggttgctgtggctaatcactaaagggggcgggtgagccatcataggggttagagtttcaggagacagaagaggagtctaggactgcctcagaagatcagtaatggtgacgaaacaaagagtcgagaaccaaaaaagttgtcagtggcgggggctgtgcattcctctcttcccgacatgctctgagatgtggaatgcaccagtccttgctccctcaccttttccgtggagtgtgtgcatgtgtgagtgtgtgtgagtgtgtgtgtgtgtgtgtgtgtgtgtgtgtgtgtgtgtgtgttgagggtcgaactggagactggaggtcagtgcctgggaacagcctggaagttcattgaaggaccagcttctgaccctgggtttcaggctggggtggcacactcaagccttgcctcgcctctggtgccctgtctgctctgggcctgtgccagcctcccacttttctgggccgattttctattgcaggctccagctagcaaatgagtgtcttaatagtcaaccattgaacaaataaaacaccagaatgtcccttatctgctagagacaaggcagaggggagaaacatgtgtttggggagtgcaagacacactgtgcttttcttttaactacttagcgattcagcagaataagaatcactgtaataaggtaataataataatgatcacagttaactttctttacaaatggtcagagaacaacattgctcgcacatcagcttgagcaggttaaagaaagctgtggcaatagctttgctttttcttgatcctgcatggagaaaactggaggaaaggggctattggagttcatcatattattcctactattggtcaggcactttttagtgttttagaatatgacaatatattaaaaagagtcaatttttcattatttccatagaatacacactaacagtatttaagtgtgtgtgtgtatacatacacacatggaataaggaaaagctattttaaatagatcacacgagaggctaatgcccttcagggacctggggtgttgagagagaagtattgataatgcagtctcctaagactgtttaaagatttcttcttcatagtaaagggagacttgttcttacaggtagatgctgcaggcacagtgctttgtaaatgaaatgatgagccgttagccccgtgggaccatctctcagtcttggcaatgacctaggtctcttcaatttgttcttcaaataaaactgcttgagttgggttcttctgtaagacctatcaaagggatccaaggagcatactgactggagatttcgaggccctgctcatcttgggatccctgcttcctagtacaggccgctgctcagtccagggcctcgatgcaaggctgaacaaataaatgtctgcgtgaatgaatgaatgcgacctggccagacctgcagtagatgtggcttctgcctcttccagtaggtggcgccacagggcttaggagtcaggaaaggggcttcagggtccgcctggtgatgaaaggtgtagggggagtttagagcttgtgacctgttggggctgtgctgcttccatcaggcccacacctgccccggcacaggtaacccaaaagaccagtgtgtctccgtgccgccgcacacactggaggccctcgcggcatcactgagggacccaggtcccacagtgacctctccaccctgttgtaatgagaactcctttggagcccacccagtccgtcgcaggctcttcccacagacgtctgttcccttccagcacagacagcatcccgccgagcctggaggaagccttttgggtgaatcgctgaacttggtatggccagatgttaattttctccctgatttttcactgatggtttagtaaccagagggcccggtggtgcccaagcccagtggagcatggggtgacctgaagcatgggatctgggaacccagacctgtgcagtcacagagcttgccagccaaaggcaggaggacattttcctaactttaatagggaaaagaacacaaaaacaactgggtgcacttcacagttgatttccgtttatgagtctgcctggatctcctgctgggtaatggcagaaaagctcaggagacccaggttaggaagtaactgagatttgttctaatttccagtgatgttttccagcgcctggcattttcttttctattcctttcttcactcggttttcttagttgtgtggcaagttccatgaggtctgagaagcccttggcactgtgctaagaaggggtgagtggctggcagcactttcttccttttacagtaattcctcccgcctgatacagcagctgtttgttctgtaggaggtacaggtcagccggcgtcatctcacctcttccttgctgggaccctgaaatcagtgctgagcattcagatttagcagacaattttattttccaatatggactacagaaagctgatagactgtttgcgaaacacctggagacttaacaacaagcctaattaacaaaataatcacactgatttcatctgtttctagattccatcctcacagttgcctaggttaatgttgggcactgtggaggagaacagaagattggttttaaaaaaaaaggcatggggaattgttttgcaacatatcaggtgccaaatatttagggacagaagtgctaaacattctgataatgaaataacactctgagccatggctgtcattattaaaataatttagtaaacacctgtttacatgtacctcaaggttagataccacgtaaaacaagtaaaagtgacaggatccctcggggaaaatggaatggaatgtttttcggtgtcatttcgaagccgggtgtgtagacttaaactgaacccactgcagaaaaagcaaaatggaaggctgaaataatgaatgccatcatttgaactgaaacctgggcactccagaagagctcttctctgtgttttaattcctagatggggtgcttatttgctcaagaccaggctttcctgagcctgtgtagacacgggcctggagcaggtagacagaccctcttggtttctatagttgaggcacccctggaggcagctgtttatcatggcaggaagggaagtggatgcattctctactgccccctttcccctgccgaattcaggcaggacccgcgcaggtccctggagaaccttgcttcagtgctagctgtgtgtaccgtgtgggcaggaccccagctgggagatggggagcccaggatgaccccacagaaaagcagagctgtgagatggctggagcctccgagagctgagatgcagaaggtgaggggaagccagaggagccccaactccctagggtgtctgggagggtttggggaacaaggtcatcagggtagtcagttactccttgtggagctgaactgaatttaagttgggattgtagggactgtaggagagaagtttgggcctggagctcaggagtcggaccgaggttgaaaatagacccttccttccctggaagccgagggaactagaggaagggttcatctggctgaagcagagggtgaggaaagcgggggttaactggcaagaaacccaaacctctcagcccctcccctccccaaaaccccacagaacagttctctgcaaaacaccttcactttaaaatgggcttcttgtgctataccctgtgtgtatagggggcaaggggctaggctctggttcgttaaagggtttgtcaaacatagaataaatgtaatgtctctttgggaatttactttctaggatcaggacattttatgggtaaaggaaccttagagacaatcctcatttccagttgagaaaacagaggcccctaaaggttcatggaggcagggatgtaactaaatacaaggtcttcagtctcttcatcctcctgcctgtaccacacttggtgctggccccctgagagagcattgttagtgcttctggctaaattttgcttggtagatctttcaacctctctattcttcctccccctgcctccacctttgtactgccttaaaataatttctgcgatgttagatttaggaatggagttggaagggtggggtgggggaaatctatcattggaaaggtttaaaaacactttcttaggctacagagtagaagttcatacatgtccacaagaaactcctgcaaaattcagatcacgattttgtctgcaaacagatctgcctctaagccttttttatttgctcacttcctctcggccccaatctaggcttgtttcagcccctttgcgagagtgggatggggatgggaagccgggctgtgctgtgggacttccctggtgagctgctgggattcttcatggaccagctggcattaccagtagctggggtatagacacacagatcagccccagggtagagactgtgagacaggctgccacagactccacctgagctgggcgaccaagggcgtctttctgctcccatgtcagggttggtctcctaggacccccggcctactcccaggagacattcccagcagtggtggtagactcagcccatggaagagaatcactaggacctgcctctgacattcccatcttccttgaagtgttcattggctgacttgtttcatactctttcaagtcatctctgagaaactggaaggcctctgaggctgactcggtctagcttgaagacggaggcatgagccaggctcatgcttagagatgtggcttttgagttccctggaggaagccatcatttcagaacatagtgttgtgataatttcatgaaatattcaagctgccaatttgccaacaggggtttcttttaatacactcggctacacttggtgttgcccacttgaacctagctaaaaggaaaataaaataatcttgtctcctgtcctttagagaaccaagccaaaatctagacagtgaatgaatgttcttctccatattgcctgtgggcagaaatgttgacttgagtactcaattaagctctatttactttataaccattgtgtcatgtacagtcatttatattcctttctttcttccaaaataatctacgttgggctaaaacctttcaaagacattaacaaaagtaacaaagtaaatagctaaagaataaataaggctgtaggctagagaaatgacttgggtcttgggtcacattctttgacttcatctctttctctgagagttcagaaggaatcaaatccctttttttttttttgtctgtaaagtggagataataatccttagccaattcacttcgcagggcagctgtgaggatccaaataggagaatgagtgtatatcgctgttcaaacatcagctactcttattctccccatcagcgagcagagcaccagagtttggaaaagcaacgccatgaagtaacattcacagcatttcaaacaactttggaggtgttgtgggagggctgacattattcaatattttaaaggtgaaaatgtaaaacaaagagaaaccagagtctgaggtggtctggctgataccagaataatcagggaggaagtgaaccattggttgagatgggcctggtattttgccctccagagagtctaggagcctgtggccagtaggctcccaggacggtggagccatgtgcactgctggcactgctgctgtttccaagctgagggtgaggacatggggatgcagggtatccgacgcctggcagctgtccacctgccatgctgctgtcccctcactgccaccacacatggctgcctggcttcggcctcaagtccaaagccacgctggcctgaagtcctttcatggcctgaaaatagggccattgagggcaggaagaacaccacctgggcaaccaatgtctcctcacttttgaacgtgaattccccaaacctaaacccaacttcccagtacaggaggacgggctggaaaataaaactttgcttcaaaagtaaactttgggtttggaaaataaacttatttatttttcatagccaaaatgttgcaggtttggagatagaggggacagttctgtgtagctccctaagacactgatcaaaataggaaagagctttaacattatagtctaagtgacaggattagttttagtttcccaaagcaaaaataatcccatcatcaaaaagtatgctgggaaactttcgcactttcgcatttgtttgcaccttgttctacccccagctctggtcctgtgatctgtggagccatatatgttttaatttttctctaaagaaaaaaagctgtattgaggtataacatctaccttgttataattttaaaatagagcaagagtaatagccaccatttattgaatgcctagcatgtgttagacaatgttcttggtgcttcatgtgcttaatatgttttatccttacagtaatcctaccacgtgggttttaattatattttttagataaggaaactgaggaccaaagtcttaagcaatgtggccacagccacccagacagtgttggggctgggaattaaattcaggtctgtcggactttcaaaacatttgctctttctgttacttctccccatggagaacagtagaaagagaaacccactatctctctatcctgggaaaatgaccttgtccttgccttctggaacctggcttagatttgccttgtggaagctcagagctggaatccttgttcttacttgatggctgcatgttgtcgtggtaccccgcctcccctcctggtcccgtcctctggctttctttccccttattcccagggtttctgccagggccctccttgcttcttcacatctcctcacaggccttcacagaccacctaggtcagtacaccttgtctcccgggggacccatttgtggcatggccttgcttcaccacccattcttggaatatttcctcagtcactccctccaggaaaatagacactctccattctcaaacgagattcccgtgagtcccggggaccatccctgtaagctgagctctccagacttcatgcattatttatttatttattttgaaatagcagctttgttgaggtataattcgcataccgtaaaatttacccttttgatgtgtatgattcagtggtctacctacttccccaatattttcatcacccgcaaaaaataccctttacccattggtagtcacttttcattcccctctctctccagcccttggcaaccatgaatttacttttgtctctatggattttcatgtgttattgacagcaataataattccttttttttttttttcctgaggtgtagtctcgctctgtcaccaggctggagtgcagtggtacgatctcgtctcactgcaacctccgactccctggttcaagcgattctcctgcctcagtctcctgagtagctgggactacaggcacccaccaccatgcctggcttatttttgtatttttagtagagatgggatttcaccatgttggccaggatggtctccatctcctgacctcttgatccacccgcttggcctcccaaagtgctgggattacaggcgtgaaccactgtgcccagccaacagcaataataattctacagttggagtttgctgtgtagtctgactgttgataacatatctcacaaatttcagacctagataggtcatgacaatttacatgataaatgatgacattgaaaggaagcacgtgaaattagggagctggctgtcatttggaggtgggattaagcgttttctttcaattatacaaaaaagtggttttagcatttttcaaaggtatcttagcataatgtcttcaaggttcatccacgttgtaccatgtgtcaggacttcgttcctttttatggctgaatagtatttcattgaaagcacacgccacattttgcttatccattcttctgttgatggacacttgcgttttcaccttttggctattgtgaatggtgctgcaatgaacaccagtattcaagtatctatttgaatccatttttagttattttgggtttacctaggagtggaattgctggccctgcaatatgactttttagctttaagagcccacttccttgggtagtgccccaaatttgaagcccacgtagatgagactacagcattaggaaatcctattgtgtcagtagtgagggtttggtatttagtctgggctcccagttcctataccagaaatttgactttaattggtgtttcacaatctgacagctgccttttgatgaggagtgactgatactgcctctgttcaaaaaaacaaaatgaaacaaaaacgaaacaaaaaaaaccggtgtctctatatccagttcagctttcacctcgttgctgacctggcttcgtaactcaacaggaaattggtgtttggcaagacaaagctatttagtctgtctctgtctctccctctgcctgtgtgtctagtccaggagcacccatgtctgtggctagagatgtgggcctgataagcctggggactgttgggagagggtggctcccctcatgtgtggctgggccgagtcctccctggactgtgagggggaggcagctctgtgctctgtgctggccaggtgctgcctgccctgccccaggcatgactgattaataagggatctctgccttcagcctgaaagctgccttcagaggggaaaagcagcttcccagggctctcacctgctcctcatacatctaaagtctaggcaagagaggcaaaaacgtgagaagaaaggtaaacagtccggggagaaaattgggaaaggaggaaggggagagggaagcgagcagtgggtagacagccaggggaaacagcagcacgtggtaggctcttggctgtggattgatgccccagttaaatgactctggaagcctctttccagtcttgggataggtattttcttggtgatcattttacctaagagtgataatatcatcggctgcatttctgtcttagcatgttgaactctgctaatctgaggaagaaacacacacatacattgatgcctcagctgaacccattaatcagagacctgggtatggataaaaaagcgcacaggctcatggaggtatgtgaagctcagaagactttgcactttgaaggccaatgtacttaatttaatccaaccgactattagtaaattcctctcctttgggctctgccctcacaccccctcactggccctgctcacaggtgcctctgggccgctgtgcagagctggaatgttgcacagcatttctccaaggtggaagcttctgttgccatatctggctgcctgagacatcctggggattcgagctatacatccaagtggatttcagtgactcagagctcatatttggtctgtcgtgaataggatcttgtgcctctgtttttaaaattatttaaaaggcaaaaattttgacctatgcccagctgtctgaaagaccaggagataagaagccttttctaggataaattgactgtgaaatatctctgaaaatgaactgtctcatgccagttgtgatgaaaacaattctaaatagttttttttcctccagaataggaatggttagtcattaacaaaaagttattgagcgtctgctatctgcaaggcagtttgcttataggatctctggattcaagggtatcttcaaggtacagccctcaactatcccttcctttaagggaagtatctattctaggaggtaagatttatgcctagacacacagacatccgcaactgtaataaaaggcagaacatgcttgatgttacaaggatataaagataaaggctcacagatttaaagaagaagggtggtatggaaagatggaataaatggaggaagtgttatatggaggttgtgactgagccgtcccttgaagggtggatagaaatggggtggagaggagaggcgcacattcccaacagaaagggtgggatggcctgtaatgtattcacagggatgtgcgttggatttcaaaggagtagtgagttgagtttggctggagcaaggttttgcagggggaagaagtgggagagaaagttggaatggcaggaaggggataatgcgtggagcaccctgtattgggctgaagagtttgcatggcatttggtaggcaatggagggccgtttaaagtgtttgagtggagagagggtatactcagagctgctcttccaggcagcaggctagaggataaggtaggggagtcgaggctgcaggtagaggggcagttctgaggctgttgccactgtccaggcaagagagggaaggagtgattttcccagcagaaagccagagacaagggagccctgtgctgtgatctggatgggaagggtagaggttgtatttggaggcaagtagaagatgcccagcatgcacgcagaattagagttctgtctaagaaggtgctatttgaagctgtggaggtggagccattggggagagagagagcagagggaaggaacgatggagagctgaagacagacaggaggagggtaaaatggaggagacaatgacagagtagtcagggaggtagcgggagagccttactactgcagggtcttggggatcaaggcaggagagcatttccaggaggccgtcattgctgaatggagtcgtgaaagggaagatgggaactgagaagcccgctggattgaatgattgggctggagagtgggttcagagtgactgttgtcccgccgaactgtgcaatgatgaggcgtggtggttgtgaagcaggggcagcacatggggaccactctttcaagaattttggctgtgaataaaaggagaggggagggatttgttggcacatgagagattggaaatgcaagagaggggagcagatggggaagaaggcagtaggcagtggcgttggggatgggagtggaaggctcaaccccagcaaaggaggtagcactctgtcttcagaggcagacatgcagtaaagcaggggatgaggaaacgtagaggggcatggggggagctggaaaggaggacaggaggggcctcgggcaggggtgctgaatcctgggagggatgaggcagctggagtggggcctgagcttgaggagaccggaagagggaacggtcagtgggaaacactatgagacacccaaagaaatccacaagggtgcccaggtcccagaggcaccggccgaggtctggaagcatgagttaggggccaggagtgattggcattcctagagaaagcttccccagaaatgaatttggcaaagtgagacagctgctgactaggtctgggggcaaagggttctagctctgtaggaggcgtgccaagctcgagctggtgtgggagaatcaaggtggccagtgggatgcaggagccaggatgcatcgttttagtgggagtcagggagtctgaatcccccagcctgcctccatcccaggtggattagtcatcagaatagccaatgggccccttgagctctgagtggatgcacaaagggccaggtggactttctttggggagcataacaggaagaagatgacaaaagcctgggtggtggagatggtggcagtttaaggatgtgggcttaggactgtggactaggatgcacgtgtgtgtgtgtgtgtgtgtgtgtgtgtgtgtgcgcgcgtgtgcgtgcctgtatgtaagggcaggcacatgaagacagactttattggtttcacagtttggcctccagagggtcttctgggtgctgacaccaaagcagagagagctcgtggtgtgcagccctgaggtcacgtttgtgacgtggatggaaggaagcaggggatgggaggactggtggaggtggacgtcagacaccaggcttcccacagactgtcttgggcatcaaggacaaggaacctgcactgttaacctcagtcagggcgcaacggtagaaaggaggagtgatggggcaatcaagaccacaagtgccaacctcagcgcactcacctggagaatacttaccttcacactgttcccacccctgtctttccatgcccttccatccaaaccaagcccagcttcacagcctatgatattggctctctggagaaccggttagcctttgtggagtgttaagccctgcgattttatatccttataattatatcagaatatcaaattcctgagaacagaacattttgttatttttttcttcatcctctcccctgttgtaatcccacaagaaaaatgttacaaaccactggaaagcctctggttggatcccacttgagctttacaatgccttgatttccctgtaatcaagaaaaatatgatatcctgaatgtttcatgaaaggatgtgagtctttgatgccaaggacagtaacactccttgaatgccatggaaatatgctctgctgagtggctctgagcttacccttggtgtaggaaggtgtgaatgaccagcaggtaccccccagaccctgccccagtccctgtcacatatgcagaggactctggttgggaggggtctggtgtgggggagggttgtgagtggcctggaggcctttcccggaggcaggcagagaggcggtggctgcaaagacctagtgtctctgagttgaggaggctgggcttctgcacctcactcaaattctctgcagcggccagagcccctgcatccattcttatatgttggcattgttcccaaaagaggcacagttgttgacttctcatagatgccaattttcgtgatgtttgcaatactagctcctcatggtaaaatgcatagacagtccagtggccccaagtccttgcctttgttcttccatttttggctagggaagtagcactagtcttctgtgtgccttgcctggaaacagtgtgttatgacggccctcgtgggagttggcatggcaggccctgtggccaccatctcaccccgtctggcctcatctggaaacctacttgcagagtttggccttattctgatgaacctcaagggcagcgctgaccccagcttgatctcttgctgggtctgggcaacaaaaggctttgggatttttccttttttccactccagtgaaacttaggcggaatgcaatgttttcctctgagggtatcagttggggaatgaactcagagtccagatggacagggttccgcagttccagctgctgccatactcagacaactggtcctctgcatttctttggagtttgacttggctttaataaaatgaaggagaaaagaaaattttgaggaagaaaatgaccagaagaagaatgtccttgagttgagggaagccatggaatgggctggtatcctgagaagtggactcagctcttcttcagagacctgtagacatcacagcctgcaatcccatgcgtccttggccctcagactggtacagctagcatccctcctaatgatttttcctgggtctgtctgaaagggtgaggataaaatggcaatcagggtcatcaacttacatctttcaggcccagaaggaaatgaacagaaaagttaaaccaaagacggagccttatggaaagattcctctaacacttgggagccaaaccccaagttatttgacttgcatgtggggggtgtgcctgtacgtgtgtggatgtgcatttgtgtgtgtcagagagaaaataagaagcagaggaggagagagcagtgtgaccgagcttgtaacccctgaaagacagcatgtggtcacaagatacagccatatctgggagcaggaatttatgttttagatgtattgttatctgtcacattggcattttgttcgaaccatttaattttcccatgtctaggattctgcatctgaccttcctaccatatgaatctatttattcttgtaacctcacttataatgaccgttacttgagtatttcaaagggattgatggaaatatggcaggagaaaactttgtgtctggtcctttacgtactattggctgcattgggacattatagcatagactcaaatgcttaaagagtcttttcttttctttttttcttgagacggcgtcactctgttgtccaggctggagtgcagtcatgtgataatggctcacggcagcctcaaattcctggactcaagcaatcctcctgagtagctgggactacaagtgtctgccaccatgcctggatacattttaaattttttgtagaggcagggtctcactgtcttttccaggcttgtttcaaactcctggcctcaagtgatcttcccgccttggcctcccaaaatgctggcattataggcttgagccaccatgcccagccttaaagagcatttctgagctaaatttgcattaagaaagaatgtcttgggggtcgagcgggaagagtataaaagagccttgctccatgacttcaaaaatagtaccagagacaaaggactttgggtcttaaaggaatgaggatgtcccatgtttgcctggccttgcatatgaaactactgagagagtcttaaatcggggatgctttatcttacttgtggtaggtgtgactaagaagtcacacccattttcaagaaagtctttgagaggaagctttattgcatcttgcattccttttcttctttctgagtttctttcctagtactgaagcatatattttttagttctttcagcaatggtctatgagtggtaaacttcctcagtctttgtctgaaattttcttttattccttttggcttctcattctagaatgatagtttagtcaggtacaggattctgtgttagcagttatctttcttcagcagtttaaagatattccattatcttctggattctattgttgctgatgagaagtctgctgtcagtctaaatgaataatcaatattctaatttttgaaaagatatattagtgttacgcagttttacaatgatgtgttaattacatagattaaaatatattgctgggagttggtgagatacttcaacttgaagattcgtatcactcaccagttcttagtcattatctctttctttctttcccttcctttctttttttttctttctttctctcttcctttttctttctttattttctttctttcccttccttccttccttccttttctctctccttccttcctccttccttccctttcccctttccccttccctccctccctccctgcctgcctgccttccttccttctctctctccttccttccttctctttctccttccttccttcctccttccttccctttccccttcccttcctccctccctcccttccttccttccttctctttctccttccttcctccttccttccctttccccttcccccttcccgcttccccctcctccctccctccctccctccctccctccctccctgcctgcctgcctgcctgcctgcctgcctgcctgccttcctccttccctttgcttccctttcctttgacagggtctcactctgttgcccaggcttgagcacagtgagtacttggctcactgcagccttgacctcccaggctcaagcaatccttccacctcagcctcctgagtagctgggactggagatgtgcggcaccatgcccaactaattgtttcatttttagtagagatgagatgaggtcttgctatgttgccgaggctgatcttgaactcctaagctccagtgatgataccacctcagcttcttaaagtgctgggattataggcatgagctactaccgctcccagcctcacgatcttttcaaatattatctctcccctagtcactctattttgttcctctggaactctattattaaaacatgtattgatctttctcattttactctttcttttaaatgttctttcatattccatattttgttatctatcctctgctacactctggataatttcttctgctttgctttccagttcaccagtttccccctcatttgtatctgctgcttagcctttaaatgcatttgcaatttcaatgacattttattcctggaagttctactttttcaaatattttagttttttcatagagtatctttttccctttataatttccattgtgaatgatttcacaatatgtgcgtgaattctccattccttggtgctctgagcatggcctgccatactgccagaactggaaatttgaacctgtgttttatagtccactaataatactttactaccatcacaaggatgttgtgaagacaaatgagataatggatgtggacatgctttgaaagtattcgtatatttaccggaaaggggttataataaatatacctctgcttggcttgttaaataattctctcttgaatcagacatttaataaaactgtatttgtaaggggaaactcttcaaatgtatgcaacaagattatatatatacaaatatatatatatacaaaaaatatatatatatttggaaacagagtctcgctgtgtcacccaggctggagtgcagtgatgctatcttggctcactgcaacctccacgttccgggttcaagcagttctcctgccccagcctcctgagtagctgggactacaggcacacgccaccgtgcctggctaatttttttgtattttagtagagacggggtttcactgtgttgccctggctggtctcaaactcctgaggtcaggcaatccgcccgcctcggcctcccagagtgctaggattataggtatgagccactgcacccagcctgacaagataatatttaatagcttacctcctttattgcctcctattcatggcacctaatgatttctagtctgttcgatggaacttacttatttacagagtgttttaaactttcaagatgttagtccatggtttctccttttcaatgttttggtatataatttggtatatgaggtatatatcagatctacattaaaatatatttttggtacattaggtatctattaggtaaattaggttaggtgtattgggtatatgtcaggtatattaggctaactcattctactaccttcatttagggaaccgaagacagggcagactgtcagtcaacaatcaatcaatccatgttaaatgtgtgctcactgtgagcttggcactgtaatagccattggcagagggcataaacaagcataaccaattttgacagccatgtattaagtgtctactagataccagacggacacagtgatagatacgttgatgaataaaacagatgggcatctgctgtgctagagcggacagtggggccgctggctggaagtgcatcacacattctcagtggcggcaacacggaccattgttaaaccacactcgtttgagaagtgagtgaatctttcagctctcaaagtcttgctctgttttccatggagctccagtgcacaggcagataccctggctccatcaaggaccaagtgtttaaaaaaacgtggtccaacagatcagcagcttttggtataagggggtcaaatacaggatgaaacatgatattttgtgaggttgagtggctatctctatgtcactgaagtttgtctttggttgtcaccttacccttctgtgcccttccattgctgtggaacattctcacttcaccctcagggatctagggcttctcccttgtatctctccttccctctgctgaaacatgaccacagagaaagggcccttgctgcactgttcttgctcatcctggcaatgcagtgctggctgtgtcttggaggagctgggctggccctccaggccaactttgccaggagacagcacaggtgggaggagaacggtctttaggatgtagctgaaagccccacaggagcagagccacctggaacctgctcagagggcggctggaatcaactatttacatttttgtataaatttaagtcattttgtcttccctctgaagtatttgcatgttcagccttttctctaattgtgaaatgaaagactgtctcctttccaagaatttcaggcatcagcaaataagttcaggaggaattagtaagatggaaatcatcctgtggatgattttgcccagcctatgacttccagttaaatccggcaaaggagaaatctaagatgacaaataggtttcagatcctgtgtggatccaggactggttatggccacctggagtgctctgttgaaaggaccctgaaccattgcctaagctcctaggggaaagtgttcagtgatggattagtgatgtctgccataggcctaggcaggagtgaaggtaagcggcaccactgcaattctggccattcctcatagagtcagagagttgcttaggttgtattttatacagcaagttgattcaatcattgccatcaaacaaatacccaattcagtgaaaaaaaaatcagttgaagtatgtgttaggataatgtagataatgtaggaaaaaacatctgcccattaaaaattatattcttccctttttattcagctaggttggtaaatcatagacatatttttaaaggtgaattaatttgagagcttctaatttctgttctagactcctgaaggagtctgcaaataatactttatagttttactgcaccttcattctaaggatttttcaaaacatctcatgcatgttgtctcattgcattgtttacttgaccccatgacagatttgtttccagcatacaggtggggaaactgaggctcggagatgatctgacttgccgaaagttgaatggcaagtctgagcaggtgcaggcttggccctgctcttcttcctttgtaccatgaacttgttgcgactcctctggggtctcctctgggagatggaaatttccatccagggagtactgttattgataggccctctcagggggaggagactgccagtgccgtgactcaaaatagctgtctcttccctgctgaagatgttgccctttccgcagcaaatggatgaattagacccccctgcttcgataaaatactttagggtttatagggtggaaaattttgtttggaaatgaaaatagcccatagccatccataccctgaagctgtcagctaatgccatctgagtcacccctccccatcttctggcacctgtggggagcctccctgtggtctaccttgcggggtctgagcttggccatatttggcattctggagcctgctggctttggaagtgcctttcaacctgccaacacccacatggggacccggatcaagccatgtgtttaaatgactgggctgtggagggagctccagtggagacgtccaagggatgtagggccatttacttaacataaatcagttccctgagtgtgagtgtcttaatgcattccttcagttataaacagtttagagccatgacagccaacatcttttcacccccgctctccttagcccaggcctccatttggatttgtttctacagccagagactttgatgattgcaagggatgatagggaggccattctgaagacaaataaccattgtttatggagccctgactcctggggtggcagccgctcactgggtgcaggcatgggacctgctcatcagctcctggtgggcactaatctaagtgtgtcccatactctatcttgtttaatcttcccctcccattgatgaagtggggacctcttacattttacactttagagaaaattttacatttatggaaacccattttacagagaagaaacctgacgttcccagggcctcattaatttgctcaaggtcacacagctattgaatgggagagctggaatttgaacgtaggcagcttgttttctgagctctggcttctaaaacgctttgccatgtttatgttatttcctgtctaatttggaggctttgttgctgggcttttgagatctttcttgcttgcttaaatagcagtccataggttggcagaacaagcctgtggatactgccctgacctccggtaggaatgttcacagaagtggcgtcagtaccatggacttgtccttgtcccaacctcagatgtagaacagtggagccaggttcccagagtcctggcttgtgctgtgccccaggtttctcctgggagcggatgtgccagggcttgttcttgggagtctgcctgcacccatggagaactgacagtcagggaacccattttggtataaacaggggttggtatatttagaaataatctctagagactgtcatatgtgcttatctgcatgctcagagataaaagtcagggaggtgggtcagtaagaaaatgctggggttgacatccagttgacacatggctctttcccagggacacagggcagcctgatacatagggcctattttagggtctttcattatcggtttggaattgtcgctgtctgcactgcagtaaaacaagactcgcctggatctgcctttcctgacttgagaaaaaaagatccttacacaggcttgccttcgattcccatctttctccaacgtgctcacatgtgctagggttttttgttttctctctgcaacccacccgcagacgtaaccttctgattcactgtctaatttagggcagaaacttgcagagcaatgtcaaatgggtctgttttcacttctggatattacacatgcgtaatgttcttgctttgaaagcattccaagaggatacgataaataaaggggctcgtacacatacagctcagtggccacgtggctcacatgggtctgctgcttttgggagcgggccatgtttcttctccccttccttccctcgcctcactccctccctacctacctcccccctcccttcctcccttcacttttccccctcctttcttcctttgttaagcaaaataattttttcattcatgagcaaaaacagttttccaagggatgtgaaaaggcaacagagatggtatctctagtaccctgtatttttcagtcacaaaattatttgcctctggcttttttcccaagttcgattcccatttattctacacttgtatcggaaccattgctgtttttaatgggatgacacagttaaaatgagcccctgctttatagaatgggacttgttagacgggtcaccctggttggaaggcccgggagacctctggctctttaaacacgcagttgctgtgtgtgaaggacactgggttctgctatacggcactttctactgagtgggaaattgagacatggaacatgaaccagccacccctggaatccaggagagggctgaagcactggctggcacgtgccctggagcggacgccatgctgggctcactagctgtggcttcatgtttagcaatgaggtcgagcaacattcattacaacgcattgcccacttaagtttgatttaagatgtgtaccgtttatgatcaacagggaaatttaatttaggtacagctaatagctgcatgtgtgagtatgtgtgtggtaggttgatgagagtttcaggcatgttgtttaaatttgaacattagctaaccttctaggtaagtgtttcataatggggtatcccacatataaaaatgacattagggttcagactttgcaattgattgcacatctctcttttctaaatgttttcttctgtctttttcaagagaaaggggagatcttaatgtatgggtagtccaaggtacataatgttttatatcacagttttaaatttgtattactttttaaagaggaagatgaagtagtagtattggctagactgggttgagttgggatttgcaagtaaaaatagccttactttattgagtatctagtgtatgccaggccttatgtcaggaactttatgtgacttgtataacttaattctcacaacaaccctgtgttgtagatatgagtgtgaacaaaggagagaataggttcaaaatagctaatgccatggcagcccatagaagtttggagctggatatagggtttggggctgaggaggcaagagttacggcctcaggcctataaaaattgggggagctggaatggaacccttgcataaagcccagaaccttaaagagcttcctgttcagagaagggagatgagaaactctgtttactgctttggagtcaacagcaaggaagtgttctgtgtgtcctggggcttgctgtgtcacctttgagagagcaaaactctcgggctgtatcaaccacatgtgtggcacctgaattcatactacttgcatactataggaaatttaggataacaattaacataaaaatgaaatctaagacattgatagattaatggataaagaaaatgtggtgtatacatactgctgtggactgaatagtgtgtggaagcaaattcatgtgtggaagccctagcctccaatgtgatggtatttggggatagggcctttgggagttgattaggttcagatgaggccaggaggtgggccttcctgatgggattagtgcccttagaagaagaaacaccagagagcttgctctcactttctccctgccacgtgaggacacagagagaaggtggccatctgcaagccaaaaggagagccctcactagaaatccatctgctggcaccttgatcttggagttccagcctctagaactgtgaggaaataaatttttgtttcttaagccggctagtctatggtattttgctatgacagcctgagctgattaagatacatacagcggagtattattcagcctgaaaaaaagaaagaaatcctgtcatatgctacaacggggatgaaccttgaggacgttgtgctaagtgaaataagctggtcacagaaggatgaatactgcatgatcctatttatatgaggtatctaaagtagtcaaactcttagaagtagaattgtggttgccaagggctgaacgaggggtgcagagggggttgttcaatggatatagagtttcagttacacaagatgaaaaagttctagagatctgatcacaacaatgcacatatagttaacactagtttaactgtacacctaaaaacgcttatcgtggaagtcggtgtggcgattcctcagggatctagaactagaaataccatttgacccagccatcccattactgggtatatacccaaaggattataaatcatgctgctataaagacacatgcacacgtatgtttattgcggcactattcacaatagcaaagacttggaaccaacccaaatgtccaataatgatagactggaataagaaaatgtggcacatatacaccatggaatactatgcagccataaaaaatgatgagttcatgtcctttgtagggacatggatgaagctggaaaccatcattctcagcaaactatcacaaggacaaaaaaccaaacgccacatgttctcacttataggtgggaattgaacaatgagaacacatggacacaagaaggggtacatcacacaccaggggctgttgtggggtggggggaggggggagggatagcattaggagatatacctaatattaaatgaagagttaatgggtgcagcacaccaacatggcacatgtatacatatgtgacaaacctgcacgttgtgcacatgtaccctaaaacttaaaatataataataattaaaaaaaaatagttaagatggttgtcttagtcagtttggctgccataacaatttaccatagactgggtggcttaaacagcaagtactcatttctcacaattctggaggctgggaagtccaagatcatggtgctagcagatttgatatctggtgaggacctgcttcctggatgactgccttctcattgtctcctcactggcagagagttgagaactgaagagctctctcatggctctttctataagggcacgaatcccactcatgaggaaccatctttatgacctaattacctccagaaggccgcacctcctcataccatcacactgggagtccagtgcttcaacatataaattttggggagacacaaacatttagtccataacaatggtaaattttatatatatatttttgcctcaataacaagaaccccacaaaactagatctaggataactgatacccataggacccttcaaaaataatcacaaaaactctgaagccttcttccacagctcaggacccttcagacttttataaaataagcagtccaggctgaagatgagcttacagtaaaaaataatgtacacctcacaacagagttgaggaagagtcagcagatataacaaacagaattactaccttgaaaactgaagtcacaggacaatttgaggagaatataaaataaccttgtttaggctgggtgtggtggctcacacctgtaatcccaacactttgggaggctgaggcgggcagatcacttgaggccaggagttcaagaccagcctggccaacatggtgaaaccttgtctctactaaaaataacaaaaattatctgggcatggtggcacacacctatagtcccagctccctgggaggctgaggcaggagaatgttttgaacccaggaggcagaggttacagtgagctgagattgtgccactgcactccagactggatgacagagtgagaccctgtctcaaacaaaaaacaaaaacaaaaaaaacaaataaaataaccttgtttaaatcaaagagatggccgggcgtggtggcccatgcctgtaattccagcactttgagaagctgaggcgggtggatcacgaggtcaggagattgaggccatcctggctaacatggtgaaaccccatctctactaaaaatacaaaaaattagctggacatggtggcaggcgcctgtaatcccagctacttgggaggctgaggcaggagaatggcatgaacccgggaggcggagcttgcagtgagccaagatcgcgccactgcactccagcatgggcaacagagtgagactctgtctcaaaaaaaaaaacaaaaaacaaagagataaaggaagaaatagaaagcataataaaataatagtgctatatgaaaaaggagaagatttttaaaaagggcccaactgtatttttagaaatgaaaaacacatttaaataaataacttaatggatggattaaacattaggttagatatggtagaaggtaatatcagtggattggaagttagatctgaggaaattgcatagaatacagcccagatattaaaatattgcatatatgaaggagccattgaaagaattggtggaaagaatgaaaaaggttaacttacatctaaatggagttctaggaaacagtggagagaatgatgaaaaggcattactttaaaggataatgccaagaatgttttgaaatttaagaaagatattgatttttagattataccagcacactgagtattgagtagggtaattaaaaatacatctcgatctagacactcagtgtagaaaactgcttaaatgtcaaagaaaatcttaaaagcaagcagggagaaaagacagattatttctgtacaaacaccagacttcatcaaccacaacagacgccagaagacaatgaaataatatcttcaaagtgctcagtgaatatcaaactagaattctatacaaagctaaattatcattcaagagttaggatggaaagacatttttcggccaggtgcggtggctcacgcctgtaatcccaacactctgggaggctgaggtgggtggatcatgaggtcaggagatctagaccatcctggctaacacagtgaaaccccgtctctactaaaaaatacaaaaaattagccgagcatattggcgggcgcctgtagtccccgctactcgggaggctgaggcaggagaatggcgtgaacccgggaggtggagcttgcagtgagccgagatcgcgccactgcactccagcctgggcgacagagcgagactcagtctcaaaaaaaaaaaaaagacatttttcctataaacaaaggctgagagtatttacctctaaagtgatctgtgctgagagaactaccaagggacatgcttaataaagaagcattaattttttcatgaacctggcattgcaaatgtattttttttaagaagattaagatttaggatgattgaaatttaggatggggtgggtgcaaagatcagaatttaatgtgttctaaggtcttggtatttttcagggaaataatgaactattatttgaaatatttcataattcaaaagaaagcagacagaaatacccagacattgacctttgggcaccatcattatcactagaataacaactaatatatgcggagttcttactgtgtgccaaggtcttttatgatgttattccatttaatctcacagcaaccgtatgaaaaaggtaacgctgccattttgagaggtaagaaaacaggggggacaggggggatattcacttcagtgctgccatcactgagggtaacacacagcaatagtctgtgttccgtgaatgtggatgaaccaaaccaagctgaggttaaactataataagcaccttgctcgtgtcacatgttagagaagtgatgaaactgtggttctaactcaggcctgtctagcctgagactccctgctcttttccacagtgtctgcccctcactgtttccttctctgagtagacgagtcagacgctggccctgcacttcctgtgaattaatgccccgcttttcccctctcacacatgctttggtctgtgtgacttgtcccattcaggccctgatgtcctagtggtgtctttccaggtgtcatacagcccggcagcgtctcctgcatccttgctttgctttcaacaagactgggccggctgtcgctccccagtttctatgtggcagtcagacaacaccccccgcatggtgttgctaggaaatgcaggagcgatcatagcatttggagcaggggccctctctcctgcctcctgtacacacctgcctttaccatctgttcaggatgctcctggcaccttgaccctgccacactgagatgctccacctcattctagactgtggacctcagagcttgggttttcttaatggaggaattatcagggagaaaactggagcctggggttgctaagctacactggaccctgttctagtcacacactggagaagaggtgctgagagtgggatgtcttgcgttcaaggaattttcattcagtttcctatattttcaacaaaacgcctatctctgctcaagtctactttatatcgtatatttatatatagatatgcacacacatatgtgtacatacacacactgaataattaactcgttacgcctgtgaaaatagttttttggtggtgtttgttttttgcccctttggttcgtttaatcatggactgtgctgtttggtttcctgaattgccagttaatttcaggctaaggcagttaatcaggtagtcccacatggcctggcttgaacatagaaggaacagggagctctgatgcatttaggttctgattactggcttctcacacactgtcatcattctttggagggtttttcttgacctgagctcaaatcattccataccaaagggattcctgatttaaactgtcagtgttaaaaggcctggtggacagatggtgtcttacaggcaaacaaaggctcttggcttgctgctgatggaagccatggactcctccaatttctccttttcccccaaagaggccctggccgtagatcccagcattgccaggcagcctgtgttgttgaggactgtgtcctgtgttttggtggccaagagcatttcgactctcccaggggtgtgccagaggatcaggctatccctttcttagggacacagttgaggtgggtggaaacagcatgtaccttgccattggagaagctgggtttatgctgtgattcacccagccatctcaggttgtgctcttgggagagtctttgatcctcagtttccccagctgtagattggtgatatttgtctccacattgtaaagagaatttatgatactgaagaaaatgctgtgtaaactttaaaacaatacaaatgtaaggcattgctactctcagtgcttggaggatgttttgtgggaagttaatggcccttgctctgccatatttcagtgccaagaaccacaagagctgtcaataaatactgatgaatgatgagggggagaagccatttgactctgtggaagccagtgctttatatattaaatgcatgtattcattggatcattcattgagcaaatatttattgagttcctactaaacacgaggcactgggaataaaacactgaataaaacaagtggaatcatgactaatgtttcctctggctttcacagagttagaaaaattaggtgtgttgttttcataaaattaaattattctatatatataaaggattttaaaatgctgatagtatatctgtcctcctctttggtattaaaatgtctcttcttttgtgtgatgatggtgatagttgatttttgaaaaacttttcacatagtcaaatttgaaaaggtgttgttagttgtccttgaaatccagcttggggatgactgatctagcccaactccccacccagggcaggcctgtctttagcattctcaacaagtggtcatctagtttctacttggatagttccagggaaggggacctcactaacttcaacacgcagccattcaaatgttaaacagccattatcttttgagtgttcttttttatattaagtggaaatctaccatcctataacttctgctcatcaagcttgagtcctccatctggagcaaacaaaatatatttacttcattttcttatagccctccagatttttgaagcagactattatgtttcttccaagcatattttccagacttcttgtccccactttctttacccacgttctcccgtggcttcattcctctccctcttgccccacctctgctggtcagcttctacttgccagtgttcctcttgcagtctgttccccagaagggacacagggcttcagctgtgtgccgacttggatggagtgctcagcctgctatgtccctgattcagagctctgaatgcagattaaggaagaagtaaagattgcgtttgcctttttggcagctgtgctctactgttgactcatattgagtcgtagcctactaaaatccctagggtccttgtcatataaattgctgataaggcaagccagggttccacctaccctatgtttatgcagtgaattttttcatctaagtatagtcctttacattgtgcttattctatttcatctcgttagtgtggaccatagtttcagcttgttgaggtcatttttattctgactgaaacttccaatttactagctattcctcccagatttgtgtcagcagcacatttggcaaatttgtcttcatccaactttttaatttagtgttcaaaaggctagagccaaagacagagccttgggtcacatcagtagagacctcccagggtaaatgtatcagtgagtcaatccctaggcatctgtgcatagaatcagtgcacctatgaatgtgtcaatcatcagtgcatctctggatcagccaactgcagaccctcctgagtgtattaatcacactggtgatgtgagttctattttcagactcttctacttctcattttttaaggcaatgtcaaccttttccattattgaaccaccattggtaggattatgactttcaaatttaccttttcagcccagatatctgtctcttttacatttttaattttttaattgaatagctgcagaatgttttaatttttcaaagtaaatgcactatctccacgtcctctgaaaccttcttctctttctgtgatcaacttggtgccaccaagttggccaagccaggtacctggaagccattctcagtgcttttgctttcttctcactccacagctaattcaattgagtggggtaattataaatacccttagctgttctaagagattctacctccttaatacctcataatacacccctcggactctgatccgtcttgcctatacaactgtaagaaccttctaactagattctgtactcctggcctgactccttctagccctcatcctgtactgtgtcaccaggaaacaaaagcctcactcagattatgtcagtgtactgcactgaggcctttgctagcaccctgtccactgtaaatgataggtggtcctgcatcgtcttactgttctcagcttttactgtttcttctaccaaccctacacttcagatgtactgtctactgctggttcccaactgcagcatgtaaattcatgctttggatatgccgttccctgtacctgggatgcctttcactccttctagtcaactgacttctactgcttctttaggattcagatcaagcatcccctcctttgggacttcttccgcagatgcagcgggttgggcatcccttttcagcaccactgcagcactctaagtgtacccattggaaaactcatcactacatggtagactgtttgtctgcctctcccacttggtggagggcccttgcagggcaatgcctgtgctctgtttaccactggagccacagctcttagcacatagtagtaggcacttgggatttgttgaaaaaatggatgaatggaggatttgacaaatcatttccaatttgccttgaactgagtgaccattacttcccttttagcattactctatgattctgcatctgtggcatccctttgatgtactggccatataattccattcaaaaagtgaaagtgtacttgacattgattaggttttttctccatatatgttccaagtcatccgatttctaatctattctaggcttgttaaactccatttttaccacttagttgcatgtttgtttctctgatcctgtattagttagggaaggctagcagctgttacaagcagcccaaaatctcactggcttgatgcaatacgagtttaattttcagttacgtgacagtccagtgcagttactcctggtcaggtggccttccacatggtgactcagtgagcatggtccatttcattctgcagggcttctctctttgtggtctttgacgttttctccattcagctaatgtatggagaaagagaagcaattgcaggtgaggaaacagagggatggtgcgtgggagcttctcactggcccggcctggactagcacaccatcacttctgtgcacatttcactggccagaacttagtcatatggtcatgtctgactgccacggcagctggaaaatgtaggctagctgtgaccccaggaagaaaaagggaacacagatatttgtgagcatgaacagttgccattgcacccattcttagattctggacctcgtgattcccagggctgccttccagagctcttcttagtcagggcattttctgtgctccaagccctttgatcttctatctcccaggctgggtttttttatctctgccctttgcctctctgttctctcaagccctcttggccattggtacctcatttctcttttcttgctggcctgtctgatcttgactcctcatcgctccagtttcccagcagctgatcctcacttgctcacgtgtctgggactggaccatctgattcttggtacctgcttgccattgccagatgtgttcctcagggacagcccatcccattccaagtcctggcacaatgggggagagtcctttcactctgtcctgtgctttgaagtccttcctatgagtacagagtatggatttgaactctgtttttagagataattagagaactgagggagttacagtgagagccactgggagatgtgggctttgggaagccaaaagtatccatgctgtatgtcctgaagcagataagcctgaagttaatggataatctgtacgtatatgtagaaaaattgcaaaggtggtgatgctagagtacatgtttttttgttactctgaaaaagaagaaagtgtcacattttagtgtgagaattttaggtaagagacaaagaaaaaaatcataaattccagaatttgggatgccattatggagaggttaagtaatgtgctttcctagaaaaaaatgggagtggaagagcccatctcagaaggctttgcagtgacctgctgggtggcaggagatggataagcaagctcaaaatctcttcttctgccatgattctttgaaaaaaataaaaaagctgggtgttctgcttttgactctgaccttgtttgagagatgctcatactgaacgtgtttgtctctgggtaatggttccggatgattttgtaaatggaacgggtattgtcttgtaaggtttcaggaactatgatgcctgagttccattacctgttttgtcacccactcattctgcaggttactcacttgggtaggccacttctccattcttttgatggtctgcttatctattaagtgggaatgggaacaggatgaattttcaggaggtttgaatgagaagtaattcatgtttctaacacgcttcagaatacataagtacaacatcctatgggaattcaaaatacaattacacttttgttaggtttatttctccgtatgctggttctttggttcttgccttgagacatgcagctttttgcaaatgctgtttcctagaaatagctctttaaatgtgtgtgcctctcctagtgagggctgaaatggtaccctctgctgggttggaggctggggaggaaggagaggaggctgaaagtcaacaccctcaggccagggccctaactctagaggccgtgaacacggtggttagagcacgtactttgctgtcaggctgcttggtttgccggaggcttggcacaagctggttagtccctctgtgcctcagtgttctcatctgtgaagtgggcgtcataataatgcctaccttatgggggtgctgagaggattaaataaatcaatgtatgtaaaatcatgagaacagggtctggcccacagggagtactctgcaagtattaactcttatttttaaacaggtattttagaaagatgctttgcctcagatgcgttctccttggttacttgctgacgaaacaacctcctcccatgtatctgaagggcctcagagcagccttcgtgcttgcagacatgcggagaaggaccttcccactgtcctcgggtgggctcagcttacgttaagagatgaccatcaacacacggggaaagcaatttttcagttcataggatttagtcggactggttactatatgtcactgcagcgtggagggaatatcagaggactccactgcattaggcgggctgggcacttgcttgccgttgatattcttaaatgaatcacgttgttaaatgcggagggagggctgtgcgcgcagacctatattcttacttctgggagaccctgtggggctctgagactttgcacttcttagtccaaccaacttgaagtggtcccttgctcccagtgattcattctgcttttactgctgattctgtgctcttgagggattcatggttcgtgcacacgtggaagggtggggcagtgggtaaaggagtgacattgcatgagtgtatagacaatagctgcactgtgtcacttacagcctgggcttcttccgtaagccctaaaccacccctgtctgtccccccgaccctgaggtaagccattgatgtgggggcgagtggtagactaagcatccctttggaagaaaaggattaatttgcatgaagctaggaacacacttttgaaatattaaatacaacagaggtctgctgagcacctcctatgtgtaaagcaccatgctggacgccgtgcgaggtacttggagtagtaagacttgactcctgtcctcaacgagctcaagatctcttgggggagacaaacacaggaataaaacaggttgtgatgaacatggcaacagagcgtggtgacaggatgccataagaatcttggggctctgccgggcccatccggggcatgttatgtacccagagacttgacattttttaatttttaaaaactgtggtaaaaagtacgtaacacagttttcaatctgaatcatttttaagtgttacagttcagtagtgttaaatatattgttgtggaacacatctccagaactttttcatcttgaaaaattgtaactggctgggcgcggtggctgacacctgtaatcccagcacttggggaggctgaggtgggcggatcacaaggtcgggagatcgagaccagcctggccaacatagtgaaacccctactaaaaatacaaaaaattagccgggcgtggtggcaggcgcctgtagtcccagctacttgggaggctgaggcaggagaatggcgtgaacccgggaggcggaggttgcggtgagctgcgatcatgccattgcactccagcctgggtgacagtgtgagactccgtctcaaaggaaaaaaaagaaatgaaaaattgtaactacacacccattaaacaactccccatttctccctgcctccagcccctggcaaccaccattctactctctgtttttatgcatttgactactttagatacctgatgttaaagtggaatcattgaatatttgtcctttgtgactggtttatttcacgtagcataatggactgaaagttcatctgtcttacagtgtgtgtcagaatttcattgcttttaaaggctgaataatagtccattttatggatagactactttttttttttttttttttttttttgagatggagtcttgctctgtcacccaggctggagtgcagtggcatgatctcggctcactgcaacctcggtctcccaggttcaaatgattctcctgcctcagcctcctgagtagctgggattacaggtgtgcactaccctgcctggctaatttttgtattcttagtagagacagggtttcaccatgttggccaggctggtcttgaactcctgacctcaagtgatctgctcgccttggcctcccaaagtgctgggattacaggcatgagccaccgtgcccagccacggatagattatattttgtttgtccattcttctgtcaatggacatttggacttgttattgtgaatagtactgctatgaacctgggcatgcaaatatctcttggaaatcctgctttgagttcttttggatacatatccagaagtaggattgctggatcatgtagtagttctatttttaattttctgaggaatcgccatacagttttccacggtggctgctccattttactttcccgccaacagtgcttaacgttcttattcctccacatcctcgctggctcttgttaatttctattttttgatagcagccatcctaatgggtgtgaagtgatagctcatggtggtttggatttgtgtttctctgatgatcagtgatgttggccatgtgtatatcatcttggagaaatagctattcaagtcttttgcccattttaacatcaatactcgaggatttctctttctgctctgcccatatcctcagatatcgggactggcttgcttctgcagagggggccagatcaaccctgcaccagcagaggcatagggcagcaggggcttctccctctgcaagtcccaaaagtatgcgggttacttgtccccattggccatataactagcacccctctggactgcttagctctgcccatcctgctgtttctaccttgcgatgatttacatggatgagaggctgggtatgttcatttcttcttgcttcagtattaatacattaccacagacttagtggcttaaaacaacacagttttattatcttatatttttgaaggtcagatgtctaaaatgggtctgcagggctgcaatacttctggaggcacttggaagactgtttccttaccttttccagctctagagaatgcccacattccttggctcatggccctctcctctacctgcaaagagaacaatgtagcatcttttgctctcctctcgtgccttcctcttccgaggacccttgtgatgacctcagacccacatggataatcccatctcaacatccttaacttaatcacattggcaaagtttcttttgccacataaggtaacttattcacaagtaccagggatgaggacaaggacgtgtctgggggtgatggtcattattcagcccacactgggcctctgctatgtggaaggcaggggtaagagcatcttttgtagggagggttcttattctgtgccttctggacttaaactttaccctgggttagtaggaacagcatctagggatctgaaggcttgggcttgactttggtttggctttgcctgggtgggaacctaggggacaagaggcttgctttctctgagctcctgtgacctcaccttttaaaggaggtgggtgggccaggtgctctttaggtccctctcgctctgccatatcctcacctgctctcatttctcatgtggtgtcctcacattgccttttcccattggctatggagagactgaggctgccctgaagggtagaagaggaaagttatatgaaactttggggaaatggctcctgggcaccagctaattcaaaggaggacaggaatagcaggaatgaagggcgcgaaggcactgctttattgcccgcctccttcccccagcccctacataaagcatccttggaacaaacaaatggaaatactgcacaccctgtaagcctaattgggtcatacataacttgtacagtgatttcctatgaaacttcaattagccccctcttccagttcaaacctgataagctcaaatatttgtaaactgccagccagatggaagatgtgtctccttgtggcttggatatcctgtaactcaatatgtgtggtgactggcatgggcatccgtattcaaggaagggaaggagcctcgcaccctggacgtggcattgaggggcaagaaaaggtgttgtttgttctctttgggacaggtggcccgactctcctctggagcaggctgggagaagttgccaaggacagttggcgtccttcagtggctggggaaggagagggtgactcttgggtccttgtgtcattcttcatcacttccaactcaagggagaatgttgacttgaaatagttaacctttagtaagcatgcattagtattaatgcaccctatttaatccttattatattatccctgttttaccgataagaaagctggggatcaaagaggttaagttaacttagcaaagatcacatggtcaacaagtggagagctgagactcaaatggaaatgagtctcatgtctaattaaatgtcgaatttcaaaatgcatctctttctactatgccacatcatatcttctggcctcttcccttcacctaaaaccattgcccttgggagtggaatgtggagctgtgaatgaaggaggaggcagtgagccacagcctggaggaggtgacggctgcaaaccccgcactctggcagaggccagtcaaccgctttggaatgccaggctgcctggagctaactgtgggccaatcttgtgttggccactttcgtttcaggcccaaatttagttacagagtcagaaagagcaaggcccctggcagggcaaagttaccagagagtgtacgtgggtatgtgtctgtgtgggtgactatgcagtggggcctctccttcccagggaggctagtggcttcttgtggcagggtagtatcttacacagccgtgcctcccactcccctgtaccagtggagcccctggtaggcctgcaccctgatgcttcttgaccacttgtcctatgctaggcattgtgaggccacatagtggaatgagacaggactctgctctcagggttatgttggagcaggaggagaagttacatggatataagaaaggcagtgaccaaggccatgagctgcacagatggaagtgggtatgctttgtgcctccgtgttccacgctggcaacatgtgttcgtacctgtactcgtgtacctgcgtgcatgtactcaagggtgactgtggggtcatgtgggggacttgcctcctgagccccttaccctgggcaggtggtggctgctcctttccctcatcgcggagcactttacacaactgtatgatcatgggtgatctggggcccatgggggcagcttcgtaactctttggctcaactgggaagttggagcaggtatttgctaccctgagtgtgagccctaagaccatagttttatgctggaaaccgcccctctttcatgacactcagtgcctagtgcctgcagttgcaggctgccaggggaccacccaataacaaagctatgttgaggccatctgtgtttcgtgctgaaaggacatttttcttcagcagcatactgagtgcatagagcagaccaaagcagacatcccattttccccagtaacctccgcatgtgtgaaaactgggcagctgtcaccttgagaaagatgctgctgggtcaccccaaagattccacatacatgctgttgggtgcctccttgtatgtgtgtagctgttattagccccatttcacaggtgggaaaggcaaaggcaggaaggctgccaaagagcctggtattcaagggaaatgaatgagcaggcagttgtaatctcagtggcatcccactccacaatctgaagtgcatccccaagggttagggagagcagcttaagaaaccagcagacatttcagaagctgagccctatggacagtgcacatcccatgctcaaggagttccggtggtcctagcccattagccacgtttgttgagactcagcggagcacccccagtaagtggctgccctattcaggagtacttttcagattcaagtctttatcaatattaagggaggaaattcaggggtggaggtgggcgagcaggggcctcctctcttttgggaagcctatttctttggccagcatgtcctgaatgataaacttctccagcacccactagtgaattgcagaatcactgaatgccagaaaagtgcataggaccttagaggtcatttggtgaacaccctcagtttacagatgaggtgactgaagcacagagagggagataaacttgtctagagtcacacagctgcttagtgggaaagggaggaagagactcatgcattcagccccactcaaaaaagtgactcaagagggagagccgaccaggaagtgggagtggctgggactgtctgtgcttcaggggaaatgttgggggttgtgaaatgcagccactctggatggggccatgctggggtgcctacaagggccttccaggtgctcagcccttcctgtgcctctccttcattgctgcaggccccaggggctcaaccccctttaacaataacaaaatgagaccatttaatgactacttccccctgagaacttagtcgatggctgcaccatgctaagtgcttataaatgtttcaagactcttgtcacaactcagagatatctaagtctcagaaacgtaaataagttgcccgggctcacagggctagtaaatggcaatacagacgggaacttagggctcctgcttttgctgttaaccaccagatcacactatctcttcttggaggtggctgctgtaattcactcaatgtgcttgcagtcctgtccccataaaactcagtatttctagatcctgcactcccacctgtccactttttctttcctgtcttcatagaccagaagcaggtccaatttgtcttaaaggttatgaccctcctaattcctgtggggacacagacagaggagaggaacagagatagggggacagagtcacagagatgatcgagtgttacagcgtttttacagctctaggttctgctctgtgaatcctgactccattctgagatgaaaaatggtagtgccattgacttctgccttctgctttcgggttcttaaagatggacttctcctgacctccccttcttctcccttttggcccagactttcagtgcagttgaggctgcgggagaatccgggcagcactgtaagtgccctcggcccgagtcaggccatccagtgtttcgccagtccttcaaggaccctggaggagaagggctaggcagggtcggataccactggctccagagagtgtcagaaaaacctaagcagaaagaagagaagggggagtgcaggacataggaagatggcaaacagacgcccacagaagaggagagtgcatgcatcctatgaggacggagcgtggatttatgatgccagagaaactggaaggtttaggagtggagaggtcagtcttagcctgggtcccactggatggaggctgtgtgcttctctctgccttggtttcatcattcaccatcattgggaataatgtcttttgtctccttacttaaagtgatcaggcactgagttgaaatcagcattccttcagcaaacacttcttttcatactggctgtgtgccaggctctgggctaggcacagagccacagagatgagcacgtcatggcctgccctggagatactcacaggtgcccagagtggagcttttggacaggactgaaactgtgcagagatgaggggttgatctaacttcccatcaaaccagctctcgcagccagaggtccgatgcctgatttttaacggcgcttgagaaaactgttgatatatttgaaggtgagtctggttttactcagttgtgaaggcatgtttgtgcatgtgcacatatgatttatttgatatttgaaaacaatttatgaccagaattctttgcatccttctctgggcctatgtcatgtgctgagggcttgccggaagcacttgtatagggtagagacttgtcctgccacatatctctcctctggactggcctaaagtctatcctcccatctccttcctgaaggacagcttccaaatgccttcccctctggttcttttcctgaggacagacctctttctctttcctcttgggatgttcttccaagtattctgagtctctttggctttttaaaacacattaaattgaggtaactttttgttatggtaaaatatatgcaacataaaaattatcattttaaccattttaagtgtacaatttagtggcattaagtacgttcaccatgttgtataaccatcaagcactatctgtctctagaactttttgtcattccaaaccaaaactttataaccattaactcccattttctcttcctccccagccctggcaaactctattctactttctctctttacaactattctaggtacctcatataagtagaattattcaatacatgttcttgtgtgtatggcttacttcactcagcaccatgtcctcaaggctcatccatgttgtagcctgtagcagtattgtattctttttaaggctgaataatactccattgtatggatagaccacactatgtttgcccatccatttgttgacggacacttgggttgtttctatcttttgtctctttggataatgctgctatggacatgggtgtacaagtatctgttcaagtcctcgccttcaattcttttgggtatatacccagaaatggaattgctggttcatatggtaattttatgtttaatttttaaatttttatttatttatttttttgagatggagtcttgctctgtcacccaggctggagtgcagtggcgcgatctcggctcactgcaagctccgcctcccaggttcacaccattctcctgcctcagcctcccgtgtagctgggactacaggcgcctgccaccacgcccagctaatttttttgtatttttagtagagacggggtttcaccatgttagccaggatagtctcgatctcctgaccttgtgatccgcccgcctcgacctcccaaagtgctgggattacagatgtgagccaccgcgcctggccacatttaatttttttgaggaactttcatcctgttttccatagcggttgcaccattttacattccccaccagcaacacatgaagtttccaatttttccacatgattgccaatacttgttattttctgattttttcgataatagccgtcctaaggggtttgaagagccatctctggctttgaggatttccatgtaaattacagtgagccgccggggctctctgtgtggctgttcctagctgggggccccttgggttgagcttgccctgtaagcacaggtagattggaggcagccgctcagcatagctgagtgtgctctcaggccacctctgcagctgggagagcccagccatgggcagagcggggtggctgctgggctgcacctggttcagcccctgctttgagatcagtaggggaggagatccaggcaccagacaactgggagtgggggatgaggccggctggagaggctgaggggagcagtgagatgtctggaccaatgagttctagaacctgagctgtctgaactagaaggacctcgtacggtatctggtggagcctcctcattctatggaagagattgagagccagagaaggaacgtgatttgtctgagtgcgcagagcaaatgagtgatgggcctggggctggaattcagatttactgacttctggcctagttcttttcccaccgaacttggggaggagtcaagataacttcatgtctatatgaagtttgatatttaccaaggaatgacagcctcaggggagacttgcatattttttcgttgccttctaccttcttgtctgcctgctgtctggtggggttttgtagggattaatcagataaatagctttgacttttctaaatgaaagaagcattgtattttatacaaagcattgttattaaacggcctgtgagtgtgtagaaataagctgatgctgtttcttttgtcgtgccttagtgagaattagagacttccaggagtggcacaaataggctgtgtgtgggtacatttgtgtatgtaatgtttttagtgtgtacatatgcagggtgacccaccttccccatacagtgcgatcccctgacaatggaagaatttcagagccttttactaatagaggatccttgaggaatgcagcaccattttcaaggatctctggaattctgtgttctgaattatctggagagatccattaatatctgtgtatgggatatagcgattgtttttaagagttggttgcttaacatggaaaatgtgcttctgggaaaaagagttttaaaaacccagctttcatgttttattttacttcattgaaatgaggttcttcttgcgtgccccgaggctttatctctggaatgatttttactaaataattcttcatattcaggtagtactttcatagacataatcccttgtagtcttcaccattgttctgtgaggggtgtggtatcatctcagttttacagatggggacattgaggcgtggagagcatgtgtcacttggcactggtagcactgctcaccgtgtgaggggcggccgtagagctagggcctgcttgctgaagccacgtggctgtgtggctggggaagccctccctccctggaacctggttctgaggttatgtgcatggtgcactctggaccggggcttagtctcgctgccgctcactctgggcgcatagccctgctcatgcttcatggaggcgagcagataggaaacagaatggtttttaaacaagacgaaaagaaaaaggaaaagatgaagagaaaaaggaaaggatcttgcccatgtttctcagctaattttcaaaccaaccgtcttactgtgttactttaccctgaacctagatccttctgcagagaaccacagttggaaacccaggagtgcaagtggccctctgtccagagcttaggctggagttgagacggctgccgagaggtgtgctgagttcttatgggacttcttgcttctttctctgtggctgcagggagctgcctctgtttgcctgcagtgctggggatgaggaggaagtggcctcaggcaggttgggaggcaggcggcctgtctgtccccttccagaggcaggaatctggcactggggtggccacagtcatattggaagtatacttaagcaacaaaaccaaactgtaacttggttttctttctgattaccaaataattacttattgcacagaattttggaaaattaatcacaaaaatacctagtaccatttattatatattgtattttctcttactgtggccacgccagtgccagattcttgcccagccacggacagtcccactctggaagggggcagacacgctgcctgcctgccaacctgcctgaggccgcttccccattacccccagcaccacagggaaacacaggcagctccttgcagctctgtcctgagagtgtgatgttcattaactcatttgattgtcacacagtgctatgagataggcagtgttattatctgctttttacaagtgaggaagctgaggcacagagaggctaggtaccttttcaagtctcacagctagcaactgacagaggctcgaatttggatccattctgcctggtttccaggtccatgcccctgagtgccaggctgtactgcctctcagcacgtgtatattacctgacacttaaaaataacactagtgtttccttctagtatttcttctatgaaaacaaacataaaattggatgggggccgggtgcagtggctcacacctgtaatcctagcacttttggaggctgaggtgggtggatcacctgaggtcaggacttcgagaccagcctggccaacatggcaaaatcccatctctagtaaaaatacaaaaattagctgggtgtggtggcacgtgcctgtaatcccagctacttgggaggctgaggaaggaattccttgaaggaggttcaaggaattgcttgaacccgggaggcagaagatgcagtgagccaagattgcaccactacactccagcctgggagacagagcgagactccatctcaaaaaaaaaaaaacaaaaaaaaaaaacaacaaaaattggatgggagcctgatgcaggaggatcacttgagcctaggggttcaggactggcctgggcaacatagccctgtttctaccaaaaaaaaaaaaaaaaaaaaaaaaattagctgggcacggtgactcatgcctgtagtcccagctacttgggaggctaaggtgggaggattgcttgagcccagggaggttgaggctgcagtgagctgtgatcacggcactgcattccagcctgagtgacagaacgagactgtctcaaaaaaagaaaaaaaggtcgggggcagtggctcatacctgtaatcctagcactttgggaggccaaggtggatggattgcttgagcccaggagttggagaccagcctgggcaacagggtgtctctactaaaaacaaaacaaaaatctgaggtaggaggatcacctgagtctgggggagtcgtggctgcagtgagccgtgattctgccactgcagtctagcctgggcgacaagggtgagacccatctcaaaaaaaaaaaaaaaagaaaaaagaaaaaaaattgtggtcccattgtatatacttttgtggaccctgtttttgcttaatattagactgtggaaacaatttctgtattatttcatatttttcaaaatgtaattttcatggcttcctaaaatgctgtcagtggatgtgcattgatttctctaaccatttctccagtgacgggcttctaggttgtcttcaatttggtactggtatcattcacaccgtgacgagtacccaggcgcagagctttgccagactcttggattagttctctcagggtagctcctgagaagggtggtgaatgttggaatttcttaacaactcccaccagagtgctgaactgctgtcctgacagggtggagcagaccacgcttcccccgggcaaagtgcaggaggctctaggaggggttaggggctcaacctccccctcccaggtggggctgtgggagctacagctccatcgtcgtcctcaccgtgcagaacagaaatgcacgctccgcctccctgagtgtcaggcctgtgggtccgtgagctccgagcctcaggagtaggggcagcctctgctgcagggaccactgtgccatcccactgagtcccgtgacccacgaggctgggtgttcagaggcacgaggtggagtgcgagcaggtcctgccggttcccaagggtgcccgcccagttcagtgggtgacagtgaatgcgcagggtgagtgaggattagctgagggagccattctctcggatggtggcagaaggaggctggggccaccgagaatactaaaaactgccctcacaaggtcgctgcctcctgtgttctagttctgctgcctgggaaagctgtactcaccctctgcctctgccctcctaccaataaactgggccagagcaacagaacccctgcatcatgggaccaaagtccaagtaattactattatggggaaaaaagccttgggacagttacgttttgagtcatccttttattcaacacattggtagtgtgcacataccacactccaggctgccctgggctctgagaatacagtggtgcaaaacaaaggctcatgcttcctgggacttccctcctgttgggaacaagaaacacatattcatttaaccaatgataatagatacattgaacatatggcaaacatactaatttaaaataacggaagagcatcttccccgtatacttctgcacggaaacctttgaaggccaaattaaagttctgtaaaagaacttccatgcagccaatgtgttttgagtgcctcctggcaacactgtactaggatttgaggccacagtgctgtttcctgctctcaaggagcttgtgagttgctgggaaaataagagaaggacccaagtattagactttaactcatctcaggcgttcagcagctgaaggaaaggggaggctgagccagtgtctgggtcccctcagtgtggtacctggctctggggcattcttccccactgtctgcacaccctcccttctccccagacatcagcaacctgaaggatttctcctttttgtagatggctgtctgtcctcaggcaggcagattattttttattttttttaattacacttaaattctggggtacatgtgcagaatgtgcttgtttgttacataggtatagacatgccgtggtggtttgcttcgcccatcaacccatcatctacatttgtatttctcctaatgctatccctcccctatccccgtactccccgaaaggccctggtgtatgatgttccttaccctgtgtccatgtgttctcattgttcaactggccacgtatgagtgagaacacacagtgtttggttttctgttcttgcactagtttgctgagaatgatgttttccagcatcatccatgtccctgcaaaggacatgaactcatccttttttatggctgcatagtattccatggcatatatgtgccacattttctttatccagtctatcattgatgggcatttgggttggttccaagtctttgctattgtgaacggtgccgcagtaaacatatgtgtgcatgtgtgtttatagtagaatgatttataatcctttggctatatacccagtaatgggattgctgggtcaaatggtatttctagttctagttccttgaggaatcgccacactgtcttccacaatggttgaactaatttacactctcaccaacagtgtaaaagtgttcctatttctccacatcctttccagcatctgttgtttcctgagtttttaatgataaccattctaactggcatgagatggtacctcattgtggttttgatttgcatttctttaatgaccagtgatgatgagctttttttatatagttgcctgcataaatgtcttcttttgagaagtgtctgttcatatcctttacctagtttttgatgggatttttttttcttgtaaatctgtttaagttctttgtagattctggatattagcgctttgtcagatgagtagattgtaaaaattttcttccattctgtaggttgcctgttcactcagatgataatttcttttggtgtgcagaagctcttcagtttaatcagatcccatttgtctattctggcttttgttgccattgcttttggtgttttagtcatgaagtctttgcccatgccaatgtccttaatggtattgcctaggttttcttctagggtttttacggttttaggtcttaagtttaagtctttaatccatcttaagttaatttttgtataaggtataaggaagggatccagtttcagctttccgcatatggctagccaatatttccaacaccatttattaaatagggaatcctttccccattgcttgtttttgtcagatttgtgaaagatcagatggttgtagatgtgtggcattatttctgagggcctctgttctgttccattggtctatatatctgttttggtaccagtaccatgccgttttggttactgtagccttgtagatagtttgaagtcaggtagcgtgatgcccccagctttgctctttctgcttaggattgtcttggctatgcgggctcttttttggttccatatgaaatttaaagtagttttttccaattctgtgaggaaagtcaacggtagcttgataaggatagcattatatctataaattactttgggcagtatggccattttgatattgattcttcctatctatgagcatggaatgttttcccatttgtttgtgtcctctcttatttccttgaacagtggtttgtagttctccttgaagaggtccttcacatcccttgtaagttgtattcctaggtattttattctctttgttgcagttgtgaatgggagttcactcatgatttggctgtctgtccgttattggtgtataggaatgcttgtgatttttgcacattgattttgtatcctgagactttgctgaagttgcttatcagcttaaggagatttggggctgagacaatggagttttctaaatatataatcatgttatctgcaaacagagacaatttgacttcctctgtttgtatttgaataccctttatttctttctcttgcctgattgccctggccagaacttccaatactatgttgaataggagtggtgagagagggcatccttgtcttgtgccagctttcaaagggaatgcttccagtttttgcccattccgtaatctctgctgccacactaaaaaagttgaaatgctgatttttcaataaatgtgaattaatccttaactagggcctgtaatttagatttgctatcaccaggtgctgataggcgccttagttcaagtagcaagaggtcttgacttccttcctctccatgcttggaaataagtggaggaagcatttggttattatggcaaaaattatggcaatttgtcatcttcagttgaaggccgtggcttagctgtgtgtctgtcagtttgttttcttccctatggtctctgatgtcaatatgagagccctcgagtgccaagggcgttatatcagggtcctctcaccgaagcagtgttggccttgtggtcatcgcaggtggtttgcttccaggcgttccttacgaggcttccttttcctttctttaccttctttcagccagctgccccataaataacagagagcaagtgtggtttactggatcactagcaggtgtgaatgctgtagcttttccgcttttcccattggcttgggcctctgaagtgctccaggctctttgccttctccagccttcatgtagtcatcagaggcaggtgggttgtaggacagaaaagatacagttgtatttgagggagtactcgtcagttgggttggggagagagccgcagatctcctggcgccctcacggtctccttgttttggagcacatttgactgctgtggtcatggggcctgttctgggcaccccacctctcatgaactgtgtctgtagcaggatgggggagaggaggaccggcagagtgacagaatgctgctggaaatggtgtgaaaatagctcaggtaggaggaagcgcagtcagatgcggcatggcggcgggcgcatcgggaaaccactgggcgcccaccccggggagggtttccacctcagctgggcgtcctgaagccactgggtgcccaccccggggagggtttccacctcagctgggcatcctgaagccactgggcgcccaccccggggagggtttccacctcagctgggcatcgtgaagccactgggcgcccaccccggggagggtttccacctcagctgggcgtcctgaagccactgggcgcccaccccggggagggtttccacctcagctgggcatcctgaagccactgggcgcccaccctggggagggtttccacctcagctgggcatcgtgaagccactgggcgcccaccccggggagggtttccacctcagctgggcgtcctgaagccactgggcgcccaccccggggagggtttccacctcagctggggcgtcctgaagccactgggcgcccaccccggggagggtttccacctcagctggggcgtcctgaagccactgggcgcccaccctggagaaggtttccacctcagctgggcgtcctgaagccactgggcgcccaccctggagagggtttccacctgagctgggcgtcctgaagccactgggcgcccaccctggagagagtttccacctcagctgggcgtcctgaagccactgggtgcccaccccggagagggtttccacctgagctgggcgtcctgaagccactgggcgcccaccccggggaggatttctacctcatctggggcgtcctgaagccactgggcacccaccccggggagggtttccacctcagctgggcatcgtgaagccactgggcgcccaccccggggagggtttccacctgagctgggcgtcctgaagccactgggcgcccaccctggggagggtttccacctcagctggggtgtcctgaagccactgggagcccaccccggggagggtttccacctcagctgggtgtcctgaagccactgggcgcccaccctggagagggtttccacctcagctgggcatcctgaagccactgggtgctcaccctggagagggtttccacctcagctgggcatcctgaagccactgggcgcccaccccggggagggtttccacctcagctggggcgtcctgaagccactgggcgcccaccccggggagggtttccacctcagctgggcgtcctgaagccactgggtgctcaccctggagagggtttccacctcagctgggcgtcctgaagccactgggtgctcaccccggggagggtttccacctcagctgggcgtcctgaagccactgggcgcccaccctggagagggtttccacctcagctgggcatcctgaagccactgggcgcccaccccggggagggtttccacctcagctggggcgtcctgaagccactgggcgcccaccccggggagggtttccacctcagctggggtgtcctgaagccactgggtgcccaccccggggaggttttccacctcagctggggtgtcctgaaaccactgggtgctcaccccagggagggtttccacttcagctggggtgtcctgaagccactgggtgcccaccccggggagggtttccacctcagctggggtgtcctgaagccactgggtgctcaccctggagagggtttccacctcagctggggtgtcctgaagccgctgggcgtccttaagccactgggcgcccaccctggagagagtttccacctcagctgggcgtcctgaagccactgggtgctcaccctggagagggtttccacctcagctggggtgtgctgaaaccactgggcgcccaccccggggagggtttccacctcagctgggcgtcctgaagccactgggtgctcaccctggagagggtttccacctcagctggggtgtgctgaaaccactgggcgcccaccccggggagggtttccacctcagctgggcgtcctgaagccactgggtgctcaccctggagagggtttccacctcagctggggtgtcctgaggatttctctcgcttaggctggaggggaatgccagcttccccatttggccattgagaagaaagtcatctctcatttatgtgatgaaaatattagacactgaaaaaggacttttggtttctacattgttttttgggtcttagactctcttatgctttgaaaatatgtctttttgcatagggtggttaattcttgatcagaaaatccacccacccatcaacatctgaattcattcgctattgcctttttaaaaagttttcccacaattttgaattcagtgctctgctcgttatcttccccacttctcacatttctttgtcaccatgctcttcccacaaggactttgtcttaatacagcacaacctgtgttgcccagtgtgggcgcctctagccacatgtgactatctgaatgtaccgtaattgaaaattaagtaaaatgcaaaatgcattttgtcagacgtgctagctacatttcaggtgctcaggagctgcgtatgactggtagcaagggctccgtaatccagcctaggattatagagcatttctattactgtaaatgttgtattggacagtgttgctatagactggtctatatatctcagtcagggttcaggcctataacagaaacttctgtagccgtgtttagaggaaagatagtacaggaatttaggggcttatacaataattggaaatgctgcaagagcaggctttaggccgggtctgtgggaatgattcccaaaacagtgctgcagaacaggccccccgagggaactgcggttcgggtacaattatgaggctgggggacctggaagccactgtgccaagggctggctctgggatcacaccgccttatgcatgatccaggaatcaggaagccactggtgtggccctgccagccagatacctgcaaaatagatgcttccccacctgacgtagttttgattcagttcttgattggcaaaagttgtgtcaggaattctcgctccaagggaggttgggagccattgtgtttagccctctggcccctgcagtccagcggggcaccgtaggaggagggtggaagagctgctgagaccgcaagtttaccagcctcccacccaccacatggtgctcagcacacaccatccttccagagaggagtgccactggggttgagatgacagggcctcgggttatcgtctgagatcgagagacggtgtcctctctgttcacgtcctccagctatctgtgtactgcaatagatagggaagattaatggcccagctttctagtcattgggcctttagtgggtggagaaagtccggtttctgttccaggttgtctgcgatactcttaaagggaatgcaggccccttgtcactacagcaagatgacagacagcaagagccaagtgggcttctgggtgacatgttggcctgagagaaggcatttcctttgccctgcagagattgctcagtggtcaggactttagggagaaatttatttgcagttcttccctttctaggtgtgagctgcggctgctcaccctctctaaatcgatgtgggtgtctgtgtctacgaaggtggaggagtgacctgcttttgtgctcacagaaggcaccaaggccaagcagggtgactgctgctgaagcaggctggcagccccagaccttttcctactcacggctgattggggggtccctttccaatgccaggggcgttgggcatgtttattcaacggtggcatggaggcagggaagtggggagaacactggcagctagtgtttgagttctgcttgtttggagtgggggcttgaagaagggatcacctgagcccaaacctgaaacgtgagaagggattgcctagcaaagggcagagggaagaacatgaaggacattctaagtacatgcaaaggcactgcggcaggcaagagctgagcatgtctgaggcatgaaatgagccactgtgtcaggagtgcattggaccgggcccagaggggagtgaggtgaactcagagaagtgggccagggccagtctgtgcaggtgttgtaagctgttgacaaggagtttggattttgaagggatctaactaggggaatgacagggcccaatttacgagttctgtttttaaaaggtgactttggctgctgcatggagattggcttggggatggccaagagtggactgaggaaaaggtcagggtggctactgcagcacttgtgggcaagagataggtagtggcctggactaggatggagatcttcctcacaacccctttccttagaacttctcccccatggttacatccaagaaatcagtagaagagcatatggcttgagaataagcccattctttaggggtggctggactgactccagcagtgttccttctacagtgtcactgtagtccaccttcacctgtatcatgacagcattatcgttacagtccttagcaaactgtgttgagcattttctgggatatggccctgaatcaggtgcagaaatagagatggattaaagaaaaaaaaattgtttcatcactgaacaccttccaagtccccagcaccaagcccctcactcacaggggacacccaggaggcacatgccactgactcctaacttggactcctcacttggacccttgcagagcagaatgacacgaggctggccagaccgtgctggggtcctgccctcatcctggtccccagcagcagcacctgggtgcaggaggaggacgcagatgctgtcttcaggggagctgggccatttgacaggtgggaggcattttcttatgactggggatgaggtcactgctgggggcacctacctgttggtgtgtggcctgatctgcgaggcagctgctcagggccttgttcaggggtgggagcatccgtggaaacagcccagtcagacagagccagagcagacttaaatggtggcatcctttcagctggcagccaggaggctgagctttgaatcagctttataatttgaaaattgatctctttgcattgggtggtgatttcgtgctaacaaaagccgtcagggacacaatgctgcctgccctaccttcatggcaccactctggattcaaaacattgagccagagatggggattttccactcctgggagtcttcggtagttgtgccaccctgttgtgggtgacccggagatactggtagaacatttcaagtgctcaggagccacatatgactggtagccagggtattggacagcctaggattatagaacgtttccattactgtaagcattgtattagacagtgttgctacagactggtctatatgtctgaggtcagggtggggatctaccgcagtgggtgggaaaattacttggagaaggggaggcccaggcccggaggtggtcagtcccgagaggccatacctgtctcacccgagaggccacacctgtctcacccgagaggccacacctgtctcacccgagaggccatacctgtctgtctcacctgtgtgcggctctgcactcctgtgcagggccctagtcatgtcatgggaccgcagcaatgcgcagagctgccaggaccaaaatagtgtaggttgttttcttggcctctggctagggagaggttgacattccatttttccccatgggctggttcatatgtgctttctccagatggtgtgctccagaaaggtccttgcgctctgggaatggtttacaatataaataaggtccctcatggagttttgggagggctcagaaggcagcccaccaggatgtggttttcagagctgccccagggctctgcacagccagctgccgtcttggtagcttctacctcgtgctccgggtgcagggatgctcccctcacgcagcttttctgggtggtggatgtgttctcaggctggggcttcctgccctctttccaagtgttgtccccaaactcctgggactcttggtttttggaactggcagcccgtatgagatggggggattaagggcaatgcaggggggtgagtacaaagattaaggtctggggacagccgtctcaggggaggcgtgagctgtggagggcttaccatgagtgaattgggggctgggaatgccaacagttggggacagggcagcttttatgtatctgagggaaaaggagaagttagtctgggaactaaaatagtctattaaattttgtcagtgccaaacagagagtctaggaagaaaaaattatataccacagattgaatggagcaaaattagagttccagccttccctggcaagccagagaagcaggagttgctcagtggctccagtacagcagatggaaacagggcgctttccacttttgcctaagaggcgccccgaggttactgcgggggcaggtggtgtagtggatgctgtcacgtggagatcatagtaaacagaaagaatgttcttggggtcagaaatccagccccttgtatctcgaggcctggagaagcccaggaggaggcgtgcaccttgtctgtcaccatgtacacgagcacatgtgtgcgtgcatgtggagtgtgtgagagagggctgaggaggcaggggtagagtctagcagctcaccgtgagccctgtgcctgctgcagcaaccctccgtcgccccattctgtgacctttagtgagtcagacactcctttgtcttcttatgtgttaaatggagacacgcatgcttgctgggtgttcaagcagttctcatgctttgggtgccttcattaattccaatgcactctttacatcttttcctgctggatcttatgagaaaggttaaggtcccggccttattggggtcttcctcacgttaggcttgggatctacacagtgagtgcagggaggacagggacgagttacaggagagatgagacgtctcattgtagggagtgtcacgtcctccgtgagcctgatgttctgtttaatgcagtttatccctggggcagagaacaggaggaaggtgaagggaatatatatggtgaggtgagagtcggtgtcacattgagaatgtggctatgaactgggtgtggcagagaggcaattttccaggccttgaggagtggaggcggggctgtaatgctacaggggccagatggcggtagagcaggtggcaactgttgcgggacaggaggcagctgaccagctggtctccaagaggacctgaggggtcttcttgggatcatgcaggggtggtagctatgtggcatgagtgatgccattccctgccctttgtgcccatggtgggcaacactaatctatcatcctcagagtcccttaagtatatagcattgtggacagtgatgtcaatcaattggcataaaagttgaaacttattgtctgtcactggtgtgatggaaaggatatagactggagtccagcagaaatgacagccccaccaggtccaagctttgggcacctaccaagcatattagctcgtttttcggttgcaagggacagagacccaattcacattagctttagctaagtcacttaagtcacttaaacatcacagtgtgtgggggaaaatcacttggagaaggggaggctcagccagccttgcagtacagccctaatggaggtcagccccaagaggccacacctgtctcacctgcctcacctgcgtgtggctcaggtaagggctaacttcaggtgtggctggatgaggaatctggtgaggttgctcgggctctgcctctggggcaggctctctctaggtgaaaatgttcacatggctaagccaggtcatgtgctcttcacaggttcctgtggggacggggtggaggtgggggtgataggttctggaaagcaggtcacatggggagcaaagttatcttggaggtcaaacatagaaggatcagcccaagataagagttggggaggtggctgggagaggcgccaagtgttcatctgtgtcttaacaggtgaggagagggagggggtcaataaggttgagccagcaaccttaggacccagcagcttccctggaagaccctgtgcacatggaccagaaaaggccactgtgggcggccttgggtgtcatgtatgtgcaactggtctggctgcttcggccacagtctctgggcagctgaagtgtcctcagatgccaacctcaccgcccacagtagcaccctcttatctgcggcttttcttgatcctgcggcacctggccaattgactagcggtaccacgtctcaaggtcatgcatgtgttctgggagattcaggtttgggccaggctgagctgatcgcttggcaaaccttacagactctagagcgaggcatccagcctaacaggccaaagagtgtttgccaagcatatgtgctgtcttagggacagtctcagaggcttcgttgcctagacaccagagcagggcagctgtccctgcgcaggttggagccctgggttgcactggttccaatcaggtttccttcctgacactgtccctctcccctaccccatcaacccctgccactcacagctccttttcccagatagcaaatgctgtctaatgaatcaccccaaaacaaagtggctcacaacagcagacaccctgttactgctcagtctctgtggctcaggaattcaggaagttcttgtgtgggtcagtaattcaaaaagttactgatttggggcagtcctgacttggggtctctcctggggtggcagtcagatggtgattggagcagctgggggctggccagggctccctcttgccacatggcctctctgttgaggctagtctgggcttcctcacagcatggcagctcagggctgaaaggctgccttgtgtgggggctggcttcctccaggacgaccatccagagacagtcagggggatgcaacgtggctttttttttaacctatccttggaagtcacacagtgtcacttttgctgtactttattggtaaaacagtcaccaaaggctgacctcatttcaagaggagggcctagatctttctcaatgaaaagggatgtcagatataaagggatttgttgacatgatttaaaaccatcacagctcccctggcccctcctggtcaaccaacacttaaagcccagatggctttgaggtagctggatgtgaccttactctagtccagcccttctcattttattatatttatttttgtttattggaactcaggtgcagagagttgagtgaatcatactccagttcattgtacgttttccatcattgattcatgcagtgacctctcatattcactcactcattcatttatgcttcctccttgcccctgtatcttatgctcattttcctcctcaccttccttaaacaatcattctattcgatttcatgaatatcctttcatttgcatgggttcttaaaatatgtattttaatttctaggtaatgtgttgtgttgtatctgtttctgctgaggtccatacgtgctgtaatgcacggatctcatctcttgcccacctaaggtgaggcaaggagactagagcggagtgacacgcccaaggtcacccagctaaaccaggaccgcaacgatcctggccctcttccctcagcatctcacactcatgtttccacgtgccacctcctaaccgcctgcaatagcttgaaataaggttttgaaaaaattgtgaatctggggtccagagagtgtcggaagtgcccctgttttctatctagtaactgttgtgttcttttctcttttgccacaggttccaactatgggagcccacgccccgcccatgccaacatgaatgccaatgcggcagcggggctggcccctgagcacatccccaccccgggggctgccctgtcgtggcaggcggccatcgacgcagcccggcaggctaagctgatgggcagcgctggcaatgcgaccatctccacagtcagctccacgcagcggaagcggcagcaatatgggaaacccaagaagcagggcagcaccacggccacacgcccgccccgagccctgctctgcctgaccctgaagaaccccatccggagggcctgcatcagcattgtcgaatggaaatatcctttgttcaccgggctgggcatgctcctgggacctgcacgctgggtccagccctccgaggctccctgggccacgagctgtgtcagctgtgctgggctacaaacggggcctcgggcctactgcatctgcatcactggggtgctgtgaaatgcagagttctgggccccgccctagactggatgaatcagaatatctggggacggggcccagcaatctgcttgtataataagctgcctgggttgggtttttgttttttgtttttttcatataataagcaacatttgagaaaatcagcctaagaagttatgaaatatcatctcctgtagctgagcttgcccaggggcccactcatgtgttggggtaacagtcgttagttacatgctgcctcattcccttctttcccttctgtgccatggcgctggatgctttcacggccttccctctctctagggtgaaggggctcaggagatggaagagcgtagtggtcagggcccctggctgttggctggagggccctgaagcagtggttctcagccctgattgcacattagagtctcctggaaagttataacaaactacagaccactcagttccacctaggcataaaaacaaacaaacaaaaaacaacaacggaaaactctctgggtaattctaatgtgcagacaaagttgagaacactgtctggaagtgttctgtttgtccatatagaaacaagcaaatgggtccttcagaaacagtggctttgaagggatgggcgctcgctgtggagttacaagccccttacttcatcagaatcctggggctgtagaaattgggaaggacttttttttttttttttttgagacggagtctcgctctgtcacccaggctggagtgcagtggtgccgtctcggctcactgcaagctcctgggttcgcaccattgtcctgcctcagcctcctgtatagccgggaccacaggtgcccgccaccacgctcggctattcttttttgtatttttagtagaaacggggtttcaccgtgttagccaggatggtctcgatctcctaacctcgtgatctgcctgcctcggcctcccaaagtgttgggattacaggtgtaatctgccaccgtgcccagcccagaaaggacctttaagtgctgaagttcctcccccacttccacgagtgatgaaattgagccccacaggagaggctccccagggtcatgtggtcaggaacagatgggactagaaccctggtactgactgtgggaatttttataataaggattcctccaggcaggactgctgtgtctctcaagggccaggatgggagcattaggcttcatcgatgagtttctatggaaagatttaaaagtctcaggtactggttgaaagaaggtagcctagagataaagaaagtttctattgagacagaaatgttctataaatgtttgaggccaggtgcggtggctcacgcctgtaatcccagcactttgggaagccaaggcaggtggatcacctgaggtcaggagttcgagaccagcctggccaacatgaggtgaaaccttatctctgctaataatacaaaaattagccaggcgttggggcacatgccagtaattccagctgctcgggaggctgaggcaagagaattgcttgaactcgggacgaagaggttgcagtgagctgagatcatgccactgcactccagcctgaggaaaagagtgaaactctgtctcaaataaataaataaataaatataaatgtttgagcccctcaacttaaaagtattttaagaaaatgcattttaaaacaagtggctgcagctgcctgagtggccaagcatggttttagtgcccggggtactggatgggagactaggctttagtcagccccataggactgcttgcatatctgctcacggtggagtcagggagtgggagagctgagggccctgcaggtcaggcacccctgagagaagggcagcaaggcccagagaagacaaagggcttgccctaaatcacgcagctggcaactgacagagctggacttcaaatccaggttcccctgaccccgaagtccatgcccatcccacaccccatgcatccatagtactgggtaggactaggcaggtactagtagatactaggtgggaccggtgaggtcttaggaggatgctcagggcctgcagtccaggtgcactgggacacgccggacctggatccgggcctaacacctactccctgggtgctgtggccacccctccgggggagtgtgccttcccacctggaggagaggaagggggcccagccttagcagtgccaggtgggtggcattccaagattgcttgggaagactggctggacagggaaggagatagcctggagtactagccagccagttcttcttgaagaagtggaatccgaccctgtcattaggaagggaactcagcttaaaaagtaatctgggcctcaaaaggcgacacagagcacttcccagggcttacctgggttctctgcttttcagccagtggcttttcttctctgcctgattggtttttacacatgatcttctctggcattagcccagtgcctttagcatgaagtgaaggatggataggtggagagtctgaatgaggggaggggaactgatagtgccagaaaccccaagctcagctgtgccccactgtggtggaggcaatgaagtgacatgttctgggtgtgtgtgcacgggtctggtttggctgggttgttgcatccttgtcccgatggggagagcacaggcaccagctgatggaatgaaactggccagcctgtgggctcggtgtcactttcctaagcaggcgagaaaaggtttgggaggcaagaggtggcgtggtaggagggctaaaagaactgcctatgaaggcttcaaggtaactttagagtggatcagtatagaatagtccttaacactgagactgcctgagcttggatcccatcctactacttgctctgtgacctggcacaagttaacgtctgacccttctgtgcctcagttttctcatttagaaagtggggatcacaagcgtacattccacacagagcatttctgttgggccgtaagaatgtgcctggcactgagcaagctcttggcagaggtcagcttctgtccttactgtcaccagcaccagcatcagcgtctgtctcccatcatcactacttgtgcctcatccaacacaagggcagcagaatgtaaaagcttagtccgtctgggttccggtccaggctctgctatatgccagcttggggtcttggactggctgctttacttttcacccctgcaaagttgggagattgacaggtccactgtgtggcatcttttttgatatcaaggtggacatagaaaatgttctacaggaaaatggatcctcagaagtacccacaggactagggagactagtgctaagataatcactcgggttcctcccagttcagaattctgtgacgctggcccagggctgccccttaacacgtcagaaggccgtctgtggcaggggagtgaacactggacttggtgatcgggaaatccgggctctagtctcagctggtcattaacttgctgtggggccttgggaaagttcctcaggctctctgggcctcagagggttagactagatcatctctaaggtctctttctgcctcaatattcactaactttgtgagtatggatttccctgagagaattatggtggtcccttcaccccggatctccacccctctctgtcttcctcctcctcctcctgtgagactccatgaactgggctgcaaacttggcagtgggagcggggtaggtgggagtggagctggaagagcatagacgggcccttcctgggaagcttccccttgctggccttccatggagggtgtggggtggtcccgtcggaaggggtattatcacattagctcatttttctcttgagagcgtgtcctgccctgaaaatgtgatgaagaagtcagggcatgggaacctctgcctgcactactactggtgagggaaccttgggctgtcccactagagcccagcacacaccaaggaaaaatcaggaggccttggaatcaaagctttgcctgctgaagcgggacctctgcagaccagaggggtttctatgctgtctgtgagactcagccttaaagaggagacagctttccttccctacactcaggacggaccccctgccgtactcttgggggtcttcaggatctctggaacctgccagagaatgagagagaagaaatggaaaccactcttaaccttagtttaaaagattaaaaataaaatctccaaatttcaatgaaacccagagaaagtctctctgtcttggaatcctgttccacccatgtcccccgttccaggtgggcgtgggcccacaggccgttcggcataaactgtgaagaaacggggtgcttggcgcaggccatgctctttagaggcaacctcaggcacacattggggagaatgaagaccaatgcaatctaaataaatgaaaggaggggaacaagtttttagaaatctgtgtttactctggcacgcgactggcctccactgcttttgacatattagggaaaattttggcggggacccactagaagcacttaaaaaggcatatgtttcttttcagaatacaaggggcttggaatgcattgtttaaacaaaattcttatgaatctttgattcattttaaaaaatatgtagattatgtttgtttcacttgtactttctgtggcattaacttccttgactccctttctcagaccatttgaaataattattttactgactatttttgccaattgtgtggccttagcgatctatattccctttccagaagatgattccaacgccaccaattccaacctggtaagtccaccatcctcaagtctctgctttttcactcgatggagaactgcgttcagatcacatagatgcatggaatgtgggagagaagtgagacgtgtgtttggcatgtgcaggagccctgcagagctcacatcccgagtgctgttttactctttattcaaatcagcacctgtctcattccggcctgttttccaaaagaatattccagttaggtggtggtgagctctgtgtgtgtgtgtgtgtgtgtgtgtgtgtgtgtgtgtgtgtttagtagcaaatcccgtgactgctacaaaatgtgctgcaaaagttgtgagtgcaggtgttcgctgcagcgaacatctgttcttggattgtgttgtatttcctttgaatgtctttgttccattggtggggtttgctcaggtgatctggagtgttgctgcacgataaataatttctaggaagcttttaggaacatttgcttttgcagccaacatgtattattgagttagaagggccttattttattgggaaaggcggctttccatttggattgttgaggggccagctctggcaatttggggttagaattggtccatggaaaaagtggagagtgtgtttacttttggctgagcttgaagtcattacaaagacttttgctccatctgggcatgtgaggaaaagagctctggaatgcagttggcaaaattggggcactccaggatgcctctgcaaaaggcatgcagggaaaatcccgtctctttctccccctccattgcagagacaccgtcactctccacgtgatttccacatggcgtgtttggtcatcagagccaccgtctttcccctgccgtcagtaccttcctttaattactgagatggaaccgtccaatgagatggtttttaaaagaagcaggcagcttataggattctcctttccacagctgctgggctgatgccatcacagggtggttcttgtattttgtaacctttgacattttcttgggccctttcagcaaaaaaaaatatgatgcacgttttaacttctcagctgtcgccccagttttttcaggtaaccgctgatgcatagcaggtaaggtgttcaccgcctgcgggctgtggtgtcttgtggctcggcttggggccctttgttggggacaggctccaaaaatttcaaagctgggcacaccactgagtgatggcatggccagagtcggaaggcagagcatcggccgccgtccgtgaggccatccgaagcgtgacctcatctcttaaggggcaagaaatctttactgtgtcaaaataaatacaagccaaagtgtctccctgaagcaggaactccttcccttggttccatttcttccctgtgtagccacctccttcctctgccatggtcctcccaaccctcctacagtttcacatttaatctgcaacttttaaagaggagccttcgttccacatagaatccgtatcttgttcttaagctgatgacacttggggctgctcaaggcccatgcagtggtgaaggtgtgtagaggagtttggtttttcttaggtcctgagatggccacatgtagccccttcacccctcggtttccaggaggattaagggagccacttggcttgctgagctagagggaagccctgggctggctgagacccctcaactctggacctcctggaggcagaggggctcgtaggagaggacaagaggtcaccctggacttcttctggagctggagtgaggttgctgtgtacagatgaggtgggagggatggcaggtttttatcacatcacagagtgatggaagaattctaaaggaggtggtggggctgcttgcacaactgtgtaactttaccaaacatcatcgaattgtgtacttacagggggtgaactttatggtatggtaatgatacctcaaaaaagctgcagatgacttctcattctctgcattccacaatgtcgcacttcccctggggcagtgaatgctgccagctgaaggtggggggtggcatcagaaaacccttaaaacagatgaataaatacgacctcatatcagctaataaatcagaacacgattctgccccatggagaaacccatcgcgagtgctgtgacccggcctcccggtccttgctctctacagcatcttgaagctgcagcatctttgcagatgccccctttacaaagcacattctccccttgcttcttccagcctctcctcctgtgtctacacgaacgtttactaggcttttgtcctgagccctctgattttcttcttctgcactctccctttggggagctcatctgtgtccacagatttaagttacctttccaagtaaattgttgctaagactgacatctccagtgctaagcctttccaaaggcctggccccatatttcccgcattggagaggcctgtggaccggtgcagcgaccgctgaggcctgcacatcattacaacccgagagaactccaactgtgcagaccccagctcccctgcggatctgattcacatttagtagttctggggcatggtctggggatgcgcatcaaaaaatttcctcgcagggatgccgatgattagtcagctttgggaacaaccggcctcttgggcagagcaaaatttgagttggacagacctgacttcaaatcttggcttctccactttaagattaagtctgggccgggcgcagtggcccatgcctgtaatcccagcactttgggaggttgaggcaggtggatcatgaggtcaggagatcgagaccagcctggctaacacggtaaaaccccatctctactaaaaatacaaaaaattagccaggcgtggtggcgggcacctgtagtcccagctactcaggaggctgaggcaggagaatggtgtgaacgtgggaggcggagcttgcagtgagccgagatcgcgccaccgcactccagcctgggtgacagaaggagactccatctcaaaaaaaaaaaaaaaaaaaaaaggttaagtctgaatcttagtctgaggttatttagtctttccaaacctcagttccccagcttgtaaaatggaagtgacctcagagggttctagggaagagtagggcgggcagtgacaattatatgtgccaggatgtcttgccaatacctcaaacaagccccaaatagaactcattctctctcccaccacacgaccctgtccccctgaagaaaacgaaacatagcccaggtgaatgctgctccttttcttttcccttggccgggttgatggcattgctggccttgctgtcacatggaaccatctctgacatcttcttccccttgccatgcccatctgagcaggaatccagtcttggagattgtaatttgcaatgtatcacatttagctttctttctattctcaaagtcatttgttcagacttcctgtgccttagtttcttcatttataaaatggaaataacgataatgacagtacctacctcatagggttgttgtgaagattaaatgagccaaaatatgtaaagcccttaggagagcaccttagtaagggcgaagtgttgggtcttgttaatagtgctggatactattgttattattgtcatcatcatcatccttgtcaacctaacccaggccctgttgcctttttcatggactcttacagtcacctccttcctgctgtcctccctctggtctctccttccactggtctagctcgtgtgtgtgtgtgtgtgtgtgtgtgtgtgtgtgtgtgtgtgcagtcatttgccaaacatctataccaacagataggcactatgattaatagggaagatgaaactgtaaacagttgtttcaaatagtgaaaggtcttataaagggccagggtgtcagggtggaagaactgattcattttgctgtagagaaaggattaatggcaagtttcacataggttgacatatttgcattgcgtctctcaagaagaggatgccataagagatacttcaggttgaagtgtactcatgtgcaaaggcatgagtatacatgtggtcacattctttaggaccagaggaaggggtgctggttttgaggggatgagaagagccaggtgatgggggcttgatggcccatgcaaactgttggacttaactgcaggtgaggaggaggctcgaaggctttaacggcagaggagtgctcttgcagcatgaggaagatggctcagacggaggcctcactgtttgtgaagagaaaaagaaagcttgccagagtccagatggtggtgacaataaggatagagagggggcagtggatttaggaggcaagcttgcctggacgggtaaccagttggatatcatgggtggcggagagagctggctcccaggatggtgatacgaggagccaggtgcccttggccaggagaaagacttcaggaggaaggtcatatttgaggggcagggaatgatgcgtacgattagggattgtcaagtggaggagcccgtggagcgtgaggctggggatgtcctaccggcggtcgacaggagcctgcaacccaggagactgtttatgctgaggatggagacttgggggcaacaggaggagagacacaaggagaagctgtaggtatggcccagagcacctgcatcagggtggagtgggagggtagcagtgaccacagccagaccctggagaacagtgacgtttgcagagggtggaggaagaggagcaaaggaaggtcatacaccacgtgtcaggaaggcttagcctgagaggtaggaggggaacctgctgagagtggagtcttagaagctaagggaacagagagtttaagatattcaagaggggctggttggtagttcaaaatcgtggctcatggcaactcaaggccaatgacaagaggattggcctgactgagaagagctgagcttagggccaaaagtacgagaagaggatattgatctgtgtctgtacccctatggaggccctgaagtagtaggtgcatgacaactgtttgctgaggttcaatgcttgaaacattcccattgttgtgccagagtgggatgccccaaatcacttatgtaccccgaaaatgaagcttgagaaatcctccattagtttcatagctttttttaaaaaattaaagaattgcgatttcagagccctactctgagaaacagcaaagaagagatgctgatgcacctgaagcaggtggctctcaacccctgtggcataagttcatagagatgattaaaatgcatgttcccaggccctgctcccagagattctgactctggagtgggccctaggagtttgaatttttaataagctcccctggggttctgatgcaagtggtcctgggctgctctttgagaacagtgacctagaatgttcctcatggtgtgattggatccaccttcagctccctccgcaatcagctctgtctacccacaggttccctttaggatccaagcagaaagacgacacacgtcaactgctgagagctttcccactccattgggttcaagaataatctatttagcaaagcacactcacactgtcacagaattagaaaagattcttcttttcacacacacttgcaaattcacatctgtgcttgctcctgctctcagattccctcgcaaacgcatcggcttccacccattctgtcgcaggccctttcctttctcccacttatttttctaacactttgctttcttctgtttccaagagatgaaaagtattccagaatagagttttttttttaaaagatctctctctcattatttaaataaaagtctgtttgttgtatgctccatctaacatacacttttgcaccaaaatccatcatctttgttatcttttcctcatgctagtgaagcataatgaaagctgaactgggccatgacatgacaattctttctttagatttagtgctgttattggcaatgccacctctatgcagcacatcgtttataatatagcagctgtaacccctgtctaccaagagctattacctgttaggtagattgtctgatgtctgttgaacaagctctgcaagcggagccgactcattgtgtgtggaaaacttcctgtcctctgcataccctgaagcccacgaagacttggcttgagttgaaatattaagagaatatatttggcatttgaccttgtgcaaagaacagtgcatgtactttctggagcaagagccaagcttgaagtggaggtggagagaagacgggatgaggccatcaaagggatcatcttttggctgggctttcttccttcagaggttgtgagaggagaagccgtccgtcagaggggcttgagctagactaggaagaaggttgagatgtcagatttgcccatttattggtgtaaaattggggcaaccagagttgcctcataacctggctgagaggattaagtgagttaccataagtaaacttcacaggacatgcccagcacaggcgaatgtgtgttgctctttggaactctaagccaggctgagggcccctcccctctgcctggtccctgggggtaagtcacagtcattggcaccttgtgctagctttggcctcagaagggtgggaaagaagagaccaaaacgctgtgctttttggcagctgtgacccagcaagattagtgtctgtgtgctcacccttgccttctgactacacagggagagaagctgggatccattaatggccaaagaagagccccagagggagagcactggtgggggaccccactcccccacccctgagctttgtgtgtctcttgccagtctgctcaggaggtgcctgtcagcctgaggttcccccattcccacacagtgctgggttgaatcacccgacatggggccctgcacttggaccaccaccgcaagttctgagatgcgtctgagccctatcgccccccgtgctttgagaagtgaatggaaatgccactttgggttcccctcctctccctgcagtgaactgtgttttcttttattatcaggtttgcctaagagtgagaagtatttttatagggctttcatgcatcaacaataatgatgacaatgaaatgagctttattattgctatctcttatgtgttgtcctaatgcagcaggtgttagggtttgcagaaatgctagggttataaaatacactaatagataactacaagcaacaaaccacatagctactgtatcatgtacaaacaccctgtcctgtgctgtgtagtggggtgtggaaggcagggtggagagcctgtttttggatgagagaatgagcttgacacagcgcattgggaaagtgcttctacggagtcagttctcccctcagattttccggctgaatgggtctgagtgggacctgggtgtgggtgtgtcttaaaagctataccagagccagagttgcaggcactgacctaggaagagagatctgaactgtgtggccttaggtcagtcacttaacctctctgttggtatctcttttggcacgtggagtagtaatgcttgcttagtcattgtaattgcctttattgagtgaccaccaggtaccagagctttgcgtgcaatgtttctaatctccacaactgtaaattatgctttctatttatttgtttacttgatggtagagaatgtatccctcttgttcatggctgtatccccagtgctttggcaataactggcacacgtaaggctctccataaatatctgctgagtgaaccctgggtgaatgaatggatcctgtgaagtgttatccctttatttcagataagaaagtaaagtctcagagaagtaaagtgacttggtgaggcagtggcagggctgtagttggaacttaggactgtatgaaaccacagcttgggttctttgctctgttccctgggatgtgtagggtcgctgtgagtatccaatgaagtatatgtgaaaatattttaaagattaaacactctgtagcagtattaacagatttaaaataaaaacaaacaaaatttggttctgttgcaaaataaattcagtaagtaccaagttagccaaaggtaaatacattatttttttaccttttttttgagacagagtctctctctgtcgcccaggctggagtgcagtggcgcgatctcggctcactgcaagctccacctcccgggttcacgccgttctcccgtctcagcctcccgagtagctgggactacacgcgctcagcaccatgcccagctaatttttttgtatttttagtagagacggggtttcaccgtgttagtcaggatggtctcgatctcctgacctcgtgatctgcccgcctcggcctcccaaaatgctgggattacaggcgtgagccactgcgcccggccaggtaaatacattattataagacttctccaagcctctaacacaacagcaacagacactacttatgacttcacaccatgtgcagatgctgtcctaagtgccttgcgtataaatgcgtttaaacatgattatagcacgatgagatgttattatcccattcaatagatgagcacacacaagctcagagaaggtaaataattcaccctgtgagatgtagccctgaagcgaagtcatggccatgcagaagtgggtgaggcatctcccggtctgtgttcttagccattctgctacagctgcctccttgtgtggtaaggtgctccgtgagtccctggactagccagacagcacatcacctttcccactcataccatcacagacatcttgaagaatggtgttcccgggctcacacctttgggaaatgctgctctgtgttgccccaagaaccgatgcattaggagaaaggacagagctggaaacgggatgagacacgttgcaaggctggtgtaggaaaggagcaaagaccacaggactgtcttcatcaggaacatggcatttcaaaatagatggcagcttctggatgggtctgtgcttcatctcatggtcataaacccgcagagagcctggggcaattgtttgactcagggtttactcactaaatatttcagagagaggagaaagcattgtctgctctgcgtttgccagcggatgggaaaagagagatgatgatttgaagtctaaatatggtgacacctcttgctccagttttatccatctttattcattttttgggggagaatcttccaaataaattcactgtttatgtaatagaacccctttcatgtaccaaacttcttgtaatttaagtatatttgaaggaagtctttccagaatataaaatacaaatccctggatccttaaaagaaaaatctgaacatatttcatcctttttctgggactatacaattcttaggaatttcaatgattgcacctgttgtaatgctggggagctgtcaggagagctaagcaacccgcacagggtcccggaacgtcctgacctggggaagatttgggatgtgcctttcatgcaccaccctgttggggtgtcagcctcctccagcaccagcctgattaatttgctcccccctctctcctgcaggcttgggaaccagttgatcaagtccattacagttatgtgcaaagttagagtaaatagatcctgattgaggacctatggggcttacttatgaataaagtgcattagctttaatttatgggttttataacattgattttggcttcttagaagccatttttcccctttattctctttgttctctctagtttctgtatgattgaagttgttggattggcgccttctaactaataataatagcagcaataacttcagcccttacgctgctggcattgctctatggtccgtgtgttaactcatttagtcccctcgactaccccatgagacctttcttttttttttttttttttttaatgccaaacattacattttattacctttgagcttattaaccagctttgcgtttattagcaaatacatttaaatatctcttttttttttcttttctttttttattatactttaggttttagggtacatgtgcacattgtgcaggttagttacatatgtatacatgtgccatgctggtgcgctgcacccactaactcatcatctagcattaggtatatctcccaatgctatccctcccccctccccccaccccaccacagtccccagagtgtgatattccctttcctgtgtccatgtgatctcattgttcaattcccacctatgagtgagaatatgcggtgtttggttttttgttcttgtgatagtttactgagaatgatgatttccaatttcatccatgtccctacaaaggacatgaactcatcattttttatggctgcatagtattccatggtgtatatgtgccacattttcttaatccagtctatcattgttggacatttgggttggttccaagtctttgctattgtgaataatgccgcaataaacatacgtgtgcatgtgtctttatagcagcatgatttatagtcatttgggtatatacccagtaatgggatggctgggtcaaatggtatttctagttctagatccctgaggaatcgccacactgacttccacaatggttgaactagtttacagtcccaccaacaatgtaaaagtgttcgtatttctccacatcctctccagcacctgttgtttcctgactttttaatgattgccattctaactggtgtgagatggtatctcattgtggttttgatttgcatttctctgatggccagtgatgatgagcattttttcatgtgttttttggctgcataaatgtcttcttttgagaagtgtctgttcatgtccttcgcccactttttgatggggttgtttgtttttttcttgtaaatttggttgagttcattgtagattctggatattagccctttgtcagatgagtaggttgcgaaaattttctcccatgttgtaggttgcctgttcactctgatggtagtttcttttgctgtgcagaagctctttagtttaattagatcccatttgtcaattttgtcttttgttgccattgcttttggtgttttggacatgaagtccttgcccatgcctatgtcctgaatggtaatgcctaggttttcttctagggtttttatggttttaggtctaacgtttaaatctttaatccatcttgaattgatttttgtataaggtgtaaggaagggatccagtttcagctttctacatatggctagccagttttcccagcaccatttattaaatagggaatcctttccccatttcttgtttttctcaggtttgtcaaagatcagacagttgtaggtatgcggtgttatttctgagggctctgttctgttccattgatctatatctctgttttggtaccaataccatgctgttttggttactgtagccttgtagtaaagtttgaagtcaggtagtgtgatgcctccagctttgttcttttggcttaggattgacttggcaatgcgggctcttttttggttccatatgaagtttaaagtagttttttccaattctgtgaagaaagtcattggtagcttgatggggatggcattgaatctgtaaattaccttgggcagtatggccattttcacaatattgattcttcctacccatgagcatggaatgttcttccatttgtttgtatcctcttttatttccttgagcagtggtttgtagttctccttgaagaggtccttcacaacccttgtaagttggattcctaggtattttattctctttgagcaattgtgaatgggagttcacttatgatttggctctctgtttgtctgttgttggtgtataagaatgcttgtgatttttgtacattgattttgtatcctgagactttgctgaaattgcttatcagcttaaggagattttgggctgagacaatggggttttgtagatatacaatcatgtcatctgcaaacagggacaatttgacttcctcttttcctaattgaataccctttatttccttctcctgcctaattgccctggccagaacttccaacactatgttgaataggagtggtgagagagggcatccctgtcttgtgccagttttcaaagggaatgcttccagtttttgcccattcagtatgatattggctgtgggtttttcatagatagctcttattattttgaaatacgtcccatcaatacctaatttattgagagtttttagcatgaagggttgttgaattttgtcaaaggctttttctgcatctattgagataatcatgtggtttttgtctttggttctgtttatgtgctggattacatttattgatttgcgtatattgaaccagccttgcatcccagggatgaagcccacttgatcatggtggataagctttttgatgtgctgctggattcggtttgccagtattttattgaggatttttgcatcagtgttcatcaaggatattggtctaaaattctctttttttgttgtgtctctgcccggctttggtatcagaatgatgctggcctcataaaatgagttagggaggattccctctttttctattgattggaatagtttcagaaggaatggtaccagttcctccttgtacctctggtagaattcggctgtgaatccatctggtcctggactctttttggttggtaagctattgattattgccacaatttcagctcctgttattggtctattaagagattcaacttcttcctggtttagtcttgggagagtgtatgtgtcgaggaatttatccatttcttctagattttctagtttatttgcgtagaggtgtttgtagtattctctgatggtagtttgtatttctgtgggatcggtggtgatatcccctttatcattttttattgtgtctatttgattcttctctctttttttctttattagtcttgctagtggtctatcaattttgttgatcctttcaaaaaaccagctcctggattcattgattttttgaagggttttttgtgtctctatttccttcagttctgctctgattttagttatttcttgccttctgctagcttttgaatgtgtttgctcttgcttttctagttcttttaattgtgatgttagggtgtcaattttggatctttcctgctttctcttgtgggcatttagtgctataaatttccctctacacactgctttgaatgcatcccagagattctggtatgttgtgtctttgttctcgttggtttcaaagaacatctttatttctgacttcatttcgttatgtacccagtagtcattcaggagcaggttgttcagtttccatgtagttgagtggctttgagtgagattcttaatcctgagttctagtttgattgcactgtggtctgagagatagtttgttataatttctgttcttttacatttgctgaggagagctttacttccaactatgtggtcaattttggaataggtgtggtgtggtgctgaaaaaaatgtatattctgttgatttggggtggagagttctgtagatgtctattaggtccgcttggtgcagagctgagttcaattcctgggtatccttgttgactttctgtctcgttgatctgtctaatgttgacagtggggtgttaaagtctcccattattattgtgtgggagtctaagtcaatttgtaggtcactcaggacttgctttatgaatctgggtgctcctgtattgggtgcatatatatttaggatagttagctcttcttgttgaattgatccctttaccattatgtaatggccttctttgtctcttttgatctttgttggtttaaagtctgttttatcagagactaggattgcaacccctgcctttttttgttttccattggcttggtagatcttcctccatccttttattttgagcctatgtgtgtctctgcacgtgagatgggtttcctgaatacagcacactgatgggtcttgactctttatccaatttgccagtctgtgtcttttaattggagcatttagtccatttacatttaaagttaatattgttatgtgtgaatttgatcctgtcattatgatgttagctggttattttgctcattagttgatgcagtttcttcctagtctcgatggtctttacattttggcatgattttgcagcggctggtactggttgttcctttccatgtttagcgcttccttcaggagctcttttagggcaggtctggtggtgacaaaatctctcagcatttgcttgtctgtaaagtattttatttctccttcacttatgaagcttagcttggctggatatgaaattctgggttggaaattcttttctttaagaatgttgaatattggcccccactctcttctggcttgtagggtttctgccgagagatccgctgttagtctgatgggcttccctttgagggtaacccgacctttctctctggctgcccttaacattttttccttcatttcaactttggtgaatctgacaattatgtgtcttggagttgctcttctcgaggagtatctttgtggcgttctctgtatttcctgaatctgaacgttggcctgccttgctagattggggaagttctcctggataatatcctgcagagtgttttccaacttggttccattctccccatcactttcaggtacaccaatcagacgtagatttggtcttttcacatagtcccatatttcttggaggctttgctcatttctttttattcttttttctctaaacttcccttctcacttcatttcattcatttcatcttccattgctgacaccctttcttccagttgatcgcatcagctcctgaggcttctgcattcttcatgtagttcttgagccttggttttcagctccatcagctcctttaagcacttctctgtattggttattctagttatacattcttctaaatttttttcaaagttttcaacttctttgcctttggtttgagtgtcctcccgtagctcagagtaatttgattgtctgaagccttcttctctcagctcgtcaaagtcattctccatccagctttgttctgttgctggtgaggagctgcgttcctttggaggaggagaggcgctctgatttttagagcttccagtttttctgttctgttttttccccatctttgtggttttatctacttttggtctttgatgatggtgatgtacagatgggtttttggtgtggatgtcctttctgtttgttagttttccttctaacagacaggaccctcagctgcaggtctgttggagtaccctgctgtgagaggtgtcagtctgcccctgctggggggtgcctcccagttaggctgctcaggggtcaggggtcagggacccacttgaagaggcagtctgcccgttctcagatctccagccgcgtgctgggagaaccactgctctcttcaaagctgtcagacagggacatttaagtctgcagaagttactgctgtctttttgtttgtctgtgccctgcccccagaggtggagcctacagaggcaggcaggcctccttgagctgtggtaggctccacccagttcgagcttcccggctgctttgtttacctaatcaagcccgggcaatggcgggcgcccctcccccagcctcgctgccgccttgcagtttgatctcagactgctgtgctagcaatcagcgagactccgtgggcgtaggaccctccgagccaggtgtgggatatagtctcgtggtgcgccgttttttaagccggtctgaaaagcgcaatattcgggtgggagtgacccaattttccaggtgcgtccgtcacccctttctttgactcggaaagggaactccctgaccgcttgcgcttcccaggtgaggcaatgcctcgccctgctttggctcgcgcacccactggcctgcgcccactgtctggcactccctagtgagatgaacccggtacctcagatggaaatgcagaaatcacccgtcttctgcgtcggtcacgctgagagctgtagaccggagctgttcctattcggccatcttggctcctcctcgagacctttcttgtaatcaccccattttaaagatgaggaaggggcacagggcaatgaactaacttgcccaagtttgcatagctatgaagcagtggagctgggattccagcctgggtgtgtggctcccaagtctgtgcttttaactgctatgctgtgtggcccccaactaaggtataaatgggaggggtattttgctttgaatacgatgccttaattatcaggccttcaactagagtttatgcagtgtgtgcgcttctgtctttaccaagaggaccaagggaggagcaacagtgaaggagggagtgaacgtccccaggctgggtggtgtctgtaggggtcctgggggcatgccatggagcccccaggccatgccatttggaaagcataaggggtaggcaaaggggaggccttttcatctgctactacctgagaggtagacttggctttgaggccatattttcccagggatcagtgattcatattacctgagatcctcaaccaaacaggcccccgggcctcttcctaaatagatgagaatctctggttggggtgagggaacccagaatcagcctgactttctgagacaaacttaaaacttgagggacccttctcgtggactgagtccttggaagcagatcttgggagctgctgggcctgcatttgaacttggggccttcatgggaccccagtcagtactggtggttggcagggctcagagcataacatgtgggggaccccacggcgccccgcccaggtgagagcagtccccctctcgtgccgagaggctccacaggttttgcctgtgcaccctaggccccactggagacgtggaaacatcgaagagctacggcctgaacaccaggatgtgggatgggtagtaagagagtgctgagctgcatgtcctagccctgggctctggttccagttctacctctgcctggtggcacggccttgtcacttcacttctctgagttttaggtttctcggctgtgaaataaagataataattcctacctcactgagttatggcaagggcaaatgagaatatagatagaaatgctccgcccagctctaccaaaaaaaaaagtatatatatacacacacatacacacacattagctgggcatggtggcttgcacctgtagttttagctgcttgggaggctgagacgggaggagtgcttcaacccaggagttcaaggcagcagtgagctatgattacaccagggtgatggggcgagaccccatgtttattttttaaaatgctctggaaaaatgcaaagtgccatataaacatagaggcattattgtgatcattattactgttatgattcaaactagacagatatatttgtctctaaaatacttactgtttttttttttctggcacattcctctgtgaacctttttcctcagcctcctctcaagataacttagagatgcaaaagaactagaagccaagttccaaatttagttcttgacctttccaagatgggtggtgagtggtgtggctgcaacctgcctgctgccaagagtctggcagggctgccggggtccgggagcgccaggccagtggaccctgtctttgtgtgcagtcctggagccgacacatcgcctcacacaggcgcccctgccgggagctcatgcgggccactccctgttttctcactgggtctagctgaactctggcacagcgagtgtagctgctgagtagttcgtttggtgctgtcctgtgacttgcaaaccccttcctcaaatgcatagcagaaatagtgggaaaaccccagggcttttattatctgggctctcgggcacacagtcagaaacatggcctggggcagcctctcttctctgtgcctttgagtcctgaggaacaaggtcaggcatcaagaataaggaaggccaggatatccaggaggagacctcacgtctgcaccgaggcttcatcagatctgactggaagtgctgtggtccctgtggccaggccagccttcacagggctggggagcacaagccttggtgtggcctgtgcttgcagatggatcctggttgtgtgggggaaggcaggtggcaggtggtggatgctatgcttgagggctgggctgtgtacgcagctcacagtgtggaggtgcttgaaccctggcagttgggcacggttgatagggacgggccttgtgggagaaggtgtcgaaggccagggtgtggctccgagtcccacttctgctagactgaccagagagagcaggtaagagagtgaccagcagcaggccggggtcacttccacgcttcctgcccatcggaggaatgttccagaggttatcccagagagaggtgaagcccaacatggtctttcagccacacgccgggctccccttccccttctgccatgagtggaagcagcctgaggccctcaccagaagcagatgctagagccatgcctcttgtgcggcctgcagaaccgtgagccaaatacgcctcttttctttttaagtaaccctgcctcaggtattcctttatagcaacacaaatggacttagacaatccccaaggcccagacttggagtcccttcttgtaggaagttttctctgctcctccatgactggctttggtgctgccctctgtgtttccatagcattctagatgacccctatcaaagcacatttagcctcctgcttactcatctgcgtctctcagtgtgtttgttttctagcactgctgtgaaaataccatgcatttggtggcttaaaacaatagaaatttattgtctcacagttccagaggccagagtttcaaagtccaggtgttagtagcattggttcctctgggcactctgaggagtgtgttccgtgctcctgccctggctccagtgttgccagcagcgcctggcatcccttggcttctaggtgcctcactccagatctctgcctccgtcttcacatggcgcgctcccctgggtgtttgtgtctctgtgtccagctttccctcctctgataaggacagcagtcattggattagggctccttcaccttaatccagtataacctcattttcacatgattccatctgcaaagactttatttccaaataaagtccatctgcagctctcaccagcagcgagccctgtgcaagaagggatcacatctacacagatccagtgcagtacctggagtacagctggggccttgcgcatgtctgtgagggccaggccaggctgttagagtgtttcttgaaggaaggtgtgcttcagtgtggatgctggtcctgactgggccgctgcccttgcctgttagctccagacagggtgggcttctgtacccgtttacagtatagccgcctgagggaccgtggcatgtgtggcagaggagatctcttgcgcccctgaggtcctccagttatatcttagtcctgcagcttagcaccaatgcctcctcattctctgcctcctctgcccgctggcctcagacatgcgccctaaagatgggagcatgcagtgtgaactggaggtgtaaggggtgaggccgctcccaggacacagcgggcctcatgcgacatgccctggcttctggatccctaagcaccgaggccatccagggaagggctggcctcctccctggctctcagggtgctgtgaatcaggtttggcaggggtctcagcaggggcttatctctgccacagttcagtccaaacaggatgagcagctcttggtggaccagcggtgacccaggcagctcctggtgctgtgtactaggctaggagctttggagggcgtccctccctgcagacccctctctcactgcccatacggctgtgtgttgtcatcatattttggcagagaacctgtcccataaccagagaacctctgtcctgggacagggacaggccccagctcactctgggaacagtcacggtgggtggacgatttgcagaatggtcggagaccctccagcaagaggatccattgttcacgactgcagggtgatttctttgggattgcagacaagggcctcccagtcacttttggtttggtgtctgttcttaacacagttcctgaaacatagaaggcactcgatgagtatttgctgaataaataactgaatgaatatgtgaagaagagaagctgttcatggactagggattctggcaaggtgtggcatggctgagacagcaccagatgagaggctaggaggcctccatcccagacctctctctgctcctcaccagctgagtgaccttgggcaaatgtctttgcttctcttgacctctgtttgttcatttttcttaatctaggagaggagtatatgtagaggattcttttatgttctgtgcatctgtggtcttttgcctgacaagtagaccatttgacttcatatgagcacattccttcatgcattccttctgtcatatttattaaatgcctactgtgtaccaggctaggtgctggaaaagcaagatgtgcggaaacaagggtgcgcagggtctctgccctcacagagcttgtcaggtttgataagagcttacgttcttatgatgccagccaataaacaactggcaacttcatacacaccatgctttcagagcactgtgaatattaataccatggagaaagtaaaggagataatgagatggagagttccagggtaagggcccacctggagcgggtaggcagggagggtctctctgaggaggtggcactggggctgagaggtggtgacaagatgggctggctctgggcagacctggggaggaggctgcgggcaggggacagcagggccaggaccccgaggtgagcagggcccactgtggctgctgctcaggaggggagatgaaggaggatgtgagtggggttggaggggcagacaggggctgaattatgtgggtcagcatgaggagtttgttgtgagtgtgacgttggcaggtctgtgtgcttcccaaggctccagaggagcaggaaggatctggaggagggttaggaaggtagcagagataggcgagggttacggccttgactttagcattcccagagcagttgatgtggttgccagagggcctggccagagctcactggggaagaaagccctggacggtgcaagctgccatttcttgaagggaagtcggtcatggaaacatgtcaaagggacctgccagaagcttctgggacacaaggctcttgtgaggtgttttcccgtctcttttgtgtacactgtgggcttggccatccagccttcatttccctagcaacttctctacatccagatccataagagaaacctttctggtcaccccataagggatgcaagctccgtaacgagcactcaggctcctcgctgatgggggctgcgaggttccagaaggttggcccatgcagcaggccactccttagcgcctctggccctgggtagactttggcctcaggggaaaggagcgtggagacagctgtggacacccagattgctgtatatctgacagcgcttggcccccatctatctggaagtggggtgaggcagactgcattttcaagctcaaccctttcctttatggcagctggggtgggtgaccagccctgtgtaagccataataacccagcctgcatgaggataccataaagcggaagccgggcggctctttgaagggatgacgtgggaagggtatcctctcctttccagcattccttcatttggggagcactgcctccttgggacaagactctgtattggggaggcagcactgaatggggaagtccctggtctggtgggggacagccaccacctggcacgtgatggtggcaagaatgcctaatgcttatgagtgccgcagtgtgcagctctgtgccttacacacgtcacctcccaccatctcccaaggaccgtgtggggtggatcatacagtcaggcactgcataacaagagtctgatcaaggacagagcacatgtacgatggtagtcccataaaactatcacggagccgaaacctccctatctttctgccgtcgtaatggtgcagtggcactcattacttacgtgtgtgtggtggtgtggtgctgttgtaaacaaacctactgggctgacagtcttatcaaagtctagcacagacagttctgtacagtactgtacagtacacaatacttgataataaatgactgttactgatttacgtatttactgtgctatacttttaactgttattttagagtatactcctacttattaaaacaaacgttaactgtaaaacagcctcaggcacgtccttcaggaggtagccataagaaggcattgtcatcttaggacatgcagctgtgtattattttccccgaagaccttccagtggcacaagatgtggaagacagtgatatggatgatcctgaccaaggatcctgatccttgatatcgacgatcctggcctaggctaatgtggacatttgtgtgttagtttttaacaaaaaccttgaaagttaagaaaatgttacaaatagaaaaaagcttatagaatatggataaaagaaaagtatttttgtacagctatacagtgtgtttgtgttttaagctaagtgttattacaaaagagtcaaaaagttaaaaaaaattaaaaggtttgtaaagtagaaaagttacagtaagctgaggttaatttttaattgaataaagaaaatctttaaatttttttttttgttttttgagacggagtctctctctgttgcccaggctggagtgcaatggtgctatcttggctcactgctacctccgcctcccaggttcaagcaattcttctgcctcagcctctcgagtagctgagattacaggtgcctgccaccatgcccggctaagttttgtatttttagtagagacggggtttcaccatgttggccaggctggtctcgaactcaggtgatccacccgctttggcctcccaaagtgctgggattccaggtgtgagccaccgcacctggcctagaaaatctttaaaataaatgtagtgtagcctaagtgcacaatgtttgtaaagtcgacagtagtgtcctgtaatgtcctaggccctcaaattcactcaccactcactcactgactcacacagagcaactttcagtcctgcaagctccgttcatggtaagtgccctatacaggtgcaccattttttgtcttttatagattattttttatgtaccttatctatgtttagacatgtttagatacacaaatacttaccattgtgcgacagttgctacagtgttcagtacagtctcaggcacggtcagaggcctgggagcactaggctgtatgtagcatacagtctgcgtgtgtcgtaggctgtgccatccaggtttgtgtaagtgcactttctgatgttcacacaacaacaaaatcacctaacgacttatttctcagaatgtatccctgtcatcaggagatacaagactataattaggggtaaactttaaaggactttgttgagaagaccattcatgtggggcttcctggatttggttgggttgtggtacctcctctagtgatgcagagccttcctatgatttttctccctgccccaccccaatgcccaccctttcgatttgctatttcctctctccacctcaccccaacacccagtgctatttacatgctatctatatgatgtaagttgtgtctttacttttcagctgcctgactgtgaatttataatcactggtattggtaacagtaggctagttagttggtccagtcaaacaaagatgaactgatccctgctctgttgcttgtggtcagcaccacgtgggcacacaggaggactaatcattcctgtgtaaacgctgagaaaacaactaagacacatggaaaaattaggagctatctgcaggattctgactgtaatgtgattattagaaagccaataaggcagtggttagcatgaattggagtggtagaaaaggatttcttggaagaagccgggcttgagtgccatcttgaagggtgtagaagaattgtctggaccaatggtaggagtgctgggattccaggtaaggaaaagaagagacaccattccatgtgaaagatatcattttgacatataaacacagaatttccaaagttcagtctaagatcattcttagggtggtctgttttcattcattcaacaattacctatcgagcacctatcatgtatgagacacagcagtgcttaaaacacacacagttcctgccttcatagggcatccttctatctaagggagacaggtattcagtatctatttacataattatttattcatttataactcacctctaaaatgtttaggtttggggtgtgactatatttgttttaagttaatattttacgcgtgctactgaaaaaacaaaacccaaactaatgatcactgtatttcatggaagcgggggctgtctcatgaagatgacatttgtcttaaattatgattgaaaaaaatgttttagggtagattgtttgtagagtttttcatcctgctaaagtgatccctaaatcataaaacttgagacttgctgaatgaaagggataaaagagtgaggaggacctacaaatcttcatggggagtagattgtgtctgtttgaagtaaagccacacctgtcatgagggaccaggagaggcttctaggaggaaagagaacataccagggaaagaactgagcaaactttcaaccctctgcagtattagaggtggacaggagggcagcactatattggagagattgttaaactgaaaactcaattagcatgcacaaaaagtatatgtgtttaaggctgttttaactgttggtgagatgctgagctgctaagggctgcctgctgtcattacctattagcaagactttaaattctgacttgctgaagtacgtatttccccctgtagctagccatttctagtaaagcttgtttatttttatttttgtaaaaaaaatggttatagttaatttatccttttggaattggaagagcttcctgcctgaataacttttttttcttttcattttctccagtgtagaattgctggttttggccttttggagctaagtaataaaactctttgtttattctgctgggtctttgcttgtgttagagctgttttatctcaaacatttgtaattctataaattgaaatcagcttttcttacacttgtggattcctttagatttgaaatctattcttggttacgtttatagcttcaacacgcctctcattgtaggtttatacatgtgtttgcttgctcatttattttgtcatcatttgctcattttattaccagttattgagtgcctactgtgtaccaggcactgggcaaggggcattctgtgagagagggtatggtacctgcgggcttaagtagtccgtgggcttgtgaggaaaacgctagattaaatcttgattactgtaaatgtcaagtatggccaagtgtgggatttcgtggcaggagtgagctttcctggaatttgtctttcttgcctcaatttgcctgatagtcatttcatgctagggatgttttaaagtctctggggaggccctgcagtgtagaggaaaatgctgatccacaccagaaatgcgaacctggctctctgcccttgggcaagtcacttaaccctcctgagcctcagtttccatctgtcacttagagctgattatacctacttaacacccaggctttttgtgaggggcattatctcattagagataatgtttttaaaagctctttgtaaattgtgtagcattcaaatggaagttattgttatttttattattgagtgccttctaattcaacactgggatagtaacaaaagaagagaggggttattatcacccctcttccctgtcacgtttagattggggcaaggaaaggttctcaacctcgaggaatttatgatcagactggggagacaagaaccagtttgagaagcaggtaatggtagttgagagaagggatagagggctcaagaatctctccgcgcctttctggctccaaaattctacagtaggagtcaggaaaggcttcacttgtgaagtggcacttgagtgaggccgtcatcagcataggaatcagaatcatctttgtgtgctcatcatagtaaaataaatattgattgagtagcagtatgtggcaagggactcacaaatacattttggttgaggagtcaggttacttggataaaaaatgataatgaatggtacaaaattccctccactggcgccacaggaggggcagccccgggcctgaggtctttgggaaaggtgtggggaggcggtgggcacaggcctagggaagggcaggatttagacgaaagcagagccattggaaaggcatattctgtgtttccactattgacagcctcaattattggttttcccattcagctttctgctctcagtaccccattctgtttacctgctggtgggcagagcgtcacacaaccaaactcgcgtagccttcttcaccctttcccctcttttctgcagaatgggtttgttatgacttgactgtgatttttcaggcctttaatcatccaaggtgaatgtctaagggtggacccaagcagggctggacccaagcagggctgagttaactggacccaagcagggctgagttaggggaagcagggaagagaggggaaggacagcctgagcccttccagacacaggcaaaggagagaggacagacatatcctccctgagagctctccaacccccccaattatcaaagcaaatcaatgtcactctaagtcatatctccatactagctctatcctttctcctgtccctatctctaggtctataaattcagggcttaagggatttctagggaaattacagcaaacgaatcactgagagagggggggaacctccaaaatgttgtgagttgcttgtttaatgtttcaggagcttcaaagaaattgagcaatttagattaaatttcaagaagtggggctgactagagagagaggaaagttagaaacagcgtgctatagaggttgatggtgggaataaactctgctgtttcagccaggccaggcttccttccagtgtgcttctgtatgatgttaataaatgggaaagtgattgacaacttccttaggcaactttggggagtgaaatgccaaatttgggcaaagcagacctctagctttattggtattggggctttgccagaattatctgctattaaatacttccagggacctgttgcctctttgtgacaaatgttagataatttccattaactgcattattgatggagaaagcagaaaggtgagagagtggagagagtaaagattgaatgagtgtcagaactaactggaggaagagggaagataaagatgtgaagaagtatatatctgaggataaaatgtaaaatgaaattaatgaaaatacgatggtcagattggaaggagagaaaatgcaaattacagagtgaaagaagacttctttctactctcaaatgttttggggggattttgggggggcaaataggcagtaggttttcacaccttttgaaaaacccacctcttcacacttgagttttcatgttcttggttcataatcctaggattaccattgtcagttgtgcagaatcccattggaaagcaatatgccatcagtacatctggtaacaggaggatgctaggaatgggaatacagaatatttatgcaacttctaggcttctaaaaattgtatgtttacatgcatatatacacatacatgcacacttatataaaacctgtcaaatttttcaaaaatttttgaaaggattagcattataaagtcataaggaatctctgaagggactttagagtagagaaagatgtgagaaaaagcctaaatatatcactctgcagcaaaccaatcatccacacaaccacagaaatctctgataaatctcttatgaactaaactccctgttgcccgatggttctttttggaaactttgtctctgtctttcgtattgaaatatcgcactgaaaagacctgccatggagatgttgatcccacttatgggcaagagggcgtctgaacttgtcttccagccatggctcaaagattgcagatggaaatccctgctgctcacatttgtatatttgatcaaactcttttcatggccagaccaggctccaggggttctgggtcacatcttccctctagctgccatttactttgatcatactagtaatgattaccatctacagcatgtattatgtgccaggaactttgaatttgtcatctttttggttttcttgggacagggtctcactctgtctcccaggctggagggcagtggcatgatctcggctcactgcaacctctgcctcctgggctcaagcgatcttcccacctcagcctcctgagtatctgggactacaaggcatgtgacactacacccggcgagtttttgtaattttttgtagaaacagggtcttgctgtcctaagctggtctcaaactcccgggctcaagctgtcctcctgcctcgacctccaaagtaccctccctccctgcggtctggaggagttgccttgggacctgtgcttccttggctctatgcactaccagacgcagtccagtgggcagcctggcgggtggccctgggactcattgctttgcagcctgtctggaccatccctaacagtttatttttttgacttttccagtggagagtccacagagaatatgacttttccttgggtcatctgtaaagacttggcaagggatgtcttgcatctgggaagatgtggtcttgggggtcacctaagcagcagaggaaaccttgcaagatgacatttggggctaatgtggaattaactaatagactgatgagtttgcttgatctgagaactcacaaaggatgttgaggaagaaagggcagctatgacctatcttggggttttgcattttgttcttgtgaccctgtggaaatgctcagatgagtgcacatgttcagactcatgccaggccagtgtgaagaatcaagctgagtatgcatccttccgaggctcaaagccaagagaaagaaagagaggcctggtgaaatatcataggaaatgtcacggtcttttctggactctcttaaaaagcccaagacccatttaatatttcgattgcaagacatatctctactggatggtgttttggaaagctggagtttaggaaaatcctggctgtaggaatgctctactgctgtgaacattcccgctttaggaatgctcatagcagtagagagtgggctactgacttttctggttttcaacagtatcttatttttcctgaacatttattaactgtctgccctatcagagaacttctcagattgggacttcccttgagtaagagacaatgacctgaaatgcagggcgagagaaatttctttcagttttaggcggaaggtgggacccaaatttaagagagccaaccccaagtaaggaagatcagctctcactgggagctgtgtaggacccaggggggagcacaccccaggaaagggctgccggtggatccggaggcctgacctggggcccaggctgaagtagaacatcagcacctctagtagcccagcaatttggatagcaggcagagtttaaaggaccaaactggaattatgagtcaagactgggcaggaagcaggaagcaaggatgaggagccaggttatgataactagtgatgcatggggtgtccaggcccagaggcactaaaagggggtcaaggacccagcatggagactgggtaacagagagccatgctgtgctcatggaatctgggcagcaagagtagcagctcccagaggggctggctggcaaccttttgtatcagcttaggaacttttcatgttggtcaggagcagagacgcagttccagttttggctggcctggagcttgcaggataagcccgtgtctggctgcactgtaaaaataacacggagaataggatgggtcttgtccttggtctctagagcagccactacatggaagaaagaggtagaaggcaggtgtctatcaagtgacatcacagaactcaagaggagtgaatgtcacctccattccccagtctcccaacattccctggggaacagggcagagggaagacagagtaggggaattccaggataagcttcatgcacccagaatgtggaatgctcaccaaagaagaacaagagccgtgttcacatcatgatattccgccctcttaattcccaaacagggctcccaggctacagagcagctttgataacagcagtgcactccctctcctctagaaagttaggtggctttaaaataggtaaggctaatttcattccttctgtgagttctgatgaaaggggcatttggcgaaaaacacgtgtgggttggcatgcaatgaatacttatttacatgggtgttttgaagacaatgacacagaatcaaaatttaacccacaagtttaggttttcagtttccttctgcttctctcctttgagaggtagagatggagaaactgtctctaccgctcttattttctcactctgataacaatcttttccattagtagagtgctatataaggtacagtgcacttgggaaatgcctcttgggaaggtgacatgtaaaaatggtggtcaacgccacttctgggcaggtgccaaggcctgtagcagcctgtgtctttgggtcctgcatgctttcctttgtgttggctggttcctctggctgagttcactgttggtctgtctgtggcaattacggagaagcatgacagtcacagcttccctgagttctactgaactcatgaactttgttcataacagactctacaagtggtacaggattcctatggccacaactcaactcaactccgtagaaatcaatgtttatggatcattggagctaaaagaaaacttgcagatcagatcatctcatccaattccctgactttacagaatgaggaaactgaggcacagtaagatttttttttttattttttgcccaggtctgaataaaattgaaggcacccttaccatagccaggattctttgtatataccactggctgaccagtggtagctgaaaaaaaaaaaaaaagggatttgagatggtaggaggggtgtctgactgaggagccatttttataggtttttatagacatttgcattggtttggagtagcagaaccagaaatagtctttcccttttcaggagcaactctgcacagaagactcactggctttggactctgtccctatcacatacatttcagtagccaggccaaggcatctggctgggaggctgggtacgtctcagagaataagcgcttgtcatagaatgggtcgtgaagctgggcagagagccaggtttgcagaaatggctttgtattgatgaagaagggagatttttaccttgtcttggcctccatcatgaagagagtgttacaaaaaagtacagatgacagcaggccactctcggagacacacacgaagcttgtcttcctccatcccaaatacataggtcagtggaccctcaggaatccattctgatgcacgggtggatgagccaagggctgggcagaggccatttcaatagcttaatgcttgccaggtatatctgagctagtgctgccccagggacagagtatcctctgggagatctgaaccaagcgagggtgtggcagccggtggatgacttacagtcagcctatctgggcagattttaaaccctggcgtttttagtgccttgactagtgtgagaaacttgaaactcagtctcattgctatttgtggtaatggtcatttagtttcaggaaaacatcgatggtgcccttccctagatagctgcgttgcaatggaccacattatggcatgcacattaatgtagggattgttcatacaaaagagggcaaagatgccacttgtgacagaaatgactgttacccagtgtctgttctctacctctttcatagggatagaattttcagctgggcacatgactgcttagaatgaagaactacagttctcatcctcccttgtggctaagtgaggttttgtgactaagttctagatagtaggatgtcagcagaggtgatgcgtgtgacttccggtgtgtgcccttgaaggcaaagtcatgcctgccctttccctttctccctctgcaggcgtgttgccgtcatggtgaggagccatttcatatcatgcagactaaaagaccctttccaggtgctggagcaaccattcagaaggcggtgatggctgggggagggcttccatgggagagaggaagtaaatgtctctcatggggaatccctgttgttttggtctctgtcaaccatggttcaattcataacttaagttataccctacttattgggaactttgattttggaaggcaaagaaatttaaaaattaagaaataaaaataaaacaacagatagcacttggataagttggccaagttcaagtaacacaaaaaagtcaggacatggaaccaggaggtggaagtgccttgtttctcctcctcctctttccgtttcccatgtcacccacaggactggtgtgcccggtaggaaagattggtaggtcccactggtcccgagtgtcctacggccctttatattggataatattggaactggattctcctagagattgggaatggtggcagaaaaattaaaattgggaggtgaaagctcaaggaggtagttacaaagcaaaggaaaacaaacagttttgggcatccagctgcctttcagtggtggtcactatggcagagatcagcagagtgaagggctaggagatagactcatttcggatctaactttaataatcaattttaatgacccttgagcgaatggagcagttgattttcctctcaatcctctctctgtgtctgttgttcctgcaaagcctattgggacttgcctgaggaattggcccttatccttgaggttaatgaaagacaacactcaagaagcttcccacttacagaactctttctccaatttagaatggaggctacttttttttttactgtggtaaaatatacataatataacattcacattttaaccattttaaagtggcattgagtacattcatactgttgtgcaaccatcacaaccatccatctccaggactgttttcttcctgcaaaactgaaacgctctacctattaaacaatcagttcccattcccccttcccccagcccctggcacccaccattctactttctgtctatgaatttgaccactctgggaacctcatataagtggaatctcagagtatttgtccttttgtgactggagctagttttggctaagtcatgggagaggcaagtggatcccttgctggtaggaaggacagggccgtgttgacagggaccatgaggcctccgccctgcagttttcctttgtcctctgcgtggggtggggcagccctcttggggaaaaggctctcctcatttcatctttacttttccttcctgggagatggagcaaatggtgcctgccttgtctatttggagcacacaggcatagatcattaataagataattggaaggtacttggcaaaatctgaaatattaactgtctcagagaagctgaataatcacagggtctcaccaagtgccacctcaacaagtgcagctttcacccgtccttggacatttatttccctttgtctgcactctgttccctttctcccaaaatgctgggtagaggttctttaaaattcaagaaaaaaatcagacttccccttctccccagtgacattcccggcctcttctctcactcgagtgatttcctgtatgaaattcaacaacaggtccacccagaggagttctttttcctccagcttctctgtttaaaaatcttgggttcttcctgacaaaaggaggcttagtcatcttcccccagtgacaggccctacttaaaaacaaacaacgaagaaatcctacatcccactccagcttgtgctgcagagcctggccggggagggacaggggatggtacacttggaaaggcaatcaaagagtgggcggtcagaaaacaaaacctgccaggttatcaaaaggacaccacctccaatgcacagagctgcttccttcccgcacacacggaatcttcctgctccctgccccactcatcgtggtcgtggccagctgtgtccagcagcctggcgcccacttaacaaacaggagcaatgagggagactcctcacccggggccagcagtgggtcagggaagaggctggggttagggctcaggggtctcaacctggagtcctgtgtttgcagctacaactccaaggccttgggatttgcctagtggggaatcctgggctccagggaagaagtcactgaaggtttaccaggcagacttataaatggggagaaactgaagcctagaacgcccccctctctgatgactgctgcctacgctgcctccttccttctctcagctccaaaggcacagaatgtctgatcggagagtttagctgctttctactgttttctcacagtttcgtttatcagccttgtcttgccaatgatacagaagctccccgcaggacagtgggtaggtgggagcttcccgatgatcatgttggtgttgacaaagctccccaaagtggggtattccctcaggctggtctccggagccggctctgtgctctgaaagcggcccatcctgccgtcctagagtataggtgccgtctatctctgtgtgttgagttatcgggagatgaaagatttttttcacttggtgaatcctggcattgtgggaagactctcctaacacagacataattctcttgcaatcccacaggcgcacacatacacagaggcgtcacacacacacagaggcacacccctggtgtgtcatgggcgttgttttgcgtggagaacgtggagcgtgaagacacattttctatgacagtggttcccttggtgtgggattgatggacctgtggacaacaggagttttgttagtgctcttcagggtcccggagatcatgtactagaacacctttcctccacagaggaagagactgcaacccagagagctttgtcacttagacacacaattttactttgcttgggcttcagtttccctatatgaaaagaaaaaaaaaatagaattgccccaaaggatcttaaggactttttcagaattccgtacataatgagtttttattgtcattttctcaccattctttggcctttgtggaactgactagaatagctcaattgtttgttaaggaatttctgacctcaatcagttttccttatataaggagttaccagttttagagcctcatgtcacttggggctgtgtctcacttaaaagtgctgtgagagcatattggattgctgaaaggagaaactgaccacctcttagaagacatcaccaattcaaatgagggtgtctcctttcctagcgaaaacgggcacttagactagtttagagccaccggaggtgggaggatgagccagatgtccctggaaagccagtttaggggtgcttttctcatgttttccagggtttaattatgctccgtgcttgagagaaatatttttgaacctgaggattttttatcttaacgttgaacaaattatttatctttctttttctgtcccctccatagttccccaatgactctaatttttattattgttataaagcatttttccttaaagagtaaagacgcaaataaaaaaaatctgcagcttagacacaagaacaagagtgaatctgacagacctaaggttgagtgaaagaaacatggcaaaggggtgtgttcagcaggactccattcctgttaagctaaaaatgggccaaatgaagctatcttttaaggtacacatacatacgtggcaaaagcataaagaaaggtcaagaaatgatgatcgcaaagtcaaggtaatgttgtgtttctggattgatggtagttacatgaaagtatgctttattattcattaaactataaaaatatgtcatatgtaccttttaaataaaaatagaataaagtgacatggaaatcagaaaaaagctagtagcgtaaaaattgcagattcatatggtgggttgaatgctctcttccaaaaccacactaacatgatggtaaaggaatcgttaaaaaatgcataaaccacaaagacaaaatgaatccaaagaagacatcacccaccggtgtttatttgttcatttttttgtatttgaaatactctttgatgacatatttggctttgattctttggcgctggccttaacaaccatacagctgcaaccagttgcttacagggctttgcttttctgctgattttgcagaggccttctccattcctttagtttgaccaacctcagttaagctgatgtgggtgtcaacaaacagttcctcaaccaggtttttctacatagactcatgagggtcagatgcaagtacccgtgaattccacaagctaagccatcggggatgagggtggtcttcagcacccttttgaagcagtgttaatgtccatttctcccccagcagcaatgcctttcttggccatggtggaggcttaaggttggagctgaatgttgaactcactggagatgttctgccttcatgcagcccagtggcagctgggaaagctggaaagtagatggacaagtagtaacagactttgcatgtactgtatgagacagctgaatcctaagcggcagtggggaaaattgagacacaattaaacttgcagctcacaacctccaaaaggcttggaaattgtggtatcaggtatttttggaagtgacggttaaaatggggctaagaactggagaattggttcaacgtttgtattcttagaaaatgctaagagtagatggcacagtgttctcaccacaaaaataataactatgtgaggtggtgcatatgttaattagctagattgagtaattccacaatgtaaacatgcttcaaaacatgttgtacacagtaaatatatataattttatctgtccattgaaaaaaattaattagacctcagacccctactcctattctcagcaactaatactcttcccatttcagctgaggactggaggataaagcggaatgttctctaatggggataaagcaagaggtctgcatgggggcaccactggcacaatggagggcagcacgcccggggcgaatacagggctgagacttctggagtatctcccacttgctctcagagtgctgtcccataagcctgtactctctaggcagaagatctgcgtggctttccctggcagagtggaccagcctaaagaggacagccctaagggggccctaagatctagccaacagggcgttccagctgtggggccttagagcaaagcctagtgcatcataagccacacctgtgctcacaatgtcccatcagtttttggtggttctctcttaaataaggtccatcagttaaggatccctaaatgtccctaaatatcttaggaaggccttgaaaatagaaaccaaagctaacaagcaaaggatgcctatttaaatcagaatatacacgaggaaaacttaaaaaaaacacattattttctgtctttagagggataagatattatatccttgatacagaagctgattgctatgtaaagggaaaaattaaaacattgataattaagaaatgtgatgactgagtgctatgaatggttagaaaacaaaattgaagaatatccaagaaagtagggcaaaaaatcagagatggaaattaggagtaaaaaaaatatgaccattagacagtccaggaagtccagtatctgaatactaggagttccagaaagagataactacaaaaacagaggggaggaaatcaccaatgagacagttctagtacatttgctagaacagaaggatattagtatccagattgaaatggctcattaagtgcccttacaaatagatgaaacaggcctatcccaagggtacatctttgtgacatctcagaaaagtagggacaattggatcttacaagtttctaggctgggcacagtggctcacgcctgtaatcccagtaccagaggcagaggcgggtggatcgcttgagctcaggagttcgagaccagcctgggcaacatggcgaaaccatgtctttaccaaagatacaaaaaattagcgaggcttggtggtacgtgcctgtagtcccagctactcaggaggttgagatgggaggattgcttgagcctgggcgatggagcaagactctgtctcaaagaaaaaaaaagtttctagaaagaagaaatgtattacaaaaggtcaggaatcagcctgatttacccgcagccatgtgggaagctagaaggcgaaggagaattgccctcaaagttctgaagaaaaatgatttccagttgacaattttatatctgatcaaactatcactcaagcaagaaggtaaaagagaaacattttcagataggtaaaaatataaaacaaaaagaaaaaaataaaacttagcccgatgcaccttctctcaggaagctattggagttcttcaccatgaggagggagtaaaccaagggaaacataggatcccggaaatgggggccaacacagaagatggagtatgtgagagggggcccttcatagtcgtgataaagtggatgcaggacattgatctaaactaaatcatgacaaaactattgcagaggatagggaagaggtgaaagagggctaaacccttaccttctatgatgaggaaaaaaccttaaaaatcaccaaggggctacataagcatattattaaaaatatggaatggaataccaaaagaaacagctaaggaattgaaagcttattgttgttgaggggcaggttggggaggggggtaagaagagaactgtggattttttttcttcaatgaaccttttagaacaaattgactctttaaattatgtgtataggccgggcatggtggctcatgcctgtaatcccagcagtttgggaggccaaggttgggaggattacttgagcccaggagtttgagaccagcctggacaacatggcgagaccccgtctctacagaaaatacaaaaattagctgggtgtggtaacgtgtgcctgtggtcccagctactcaggaggctgaggtgggaggattgcttgagtctgggaggttgaggctgcagtgagtgcagtgagctgtgattgtaccagccttggggacagagtgagaccctgtcaataaataaataaataaataaattaaatgtatgcataagagataaagattaaaactagaaaaatgaatagctgattattggtgtttatctcctttagatttctttctttctctttttttttttttttttgagatgggagtttcgctctcattgcccaggctggagtgcaacggcataatctcggctcactgcaaccttcacctcccgggttcaagcaattctcctgcctcaacctcccaagtagctgagattacaggcatgtgccattacgcctggctaatcttttgtatttagtagagacggggtttcaccatgttggccaggctggtagcgaactcctgacctcaggtgatctgcccgcctcggcctcccaaagtgctgggattataggcgtgagccaccgctcctggcctagacttatttcatgtaagtaaaacaagagtcctgtgttgtccattcatttattccacagattttgttttgagtatctgttatgtgctgggcattgaggcaatttcttttctccttatttccccttgttttcattgctcctgttctggaccgtcctgctgggatcctatttaatttgctagttaccacctgccctatacgcctctggatttctgctgggtgtggctgtggccctagtgcgatgtcagggaggtcttacttaatgcttctctcatgctctccagtggtgagttgtcagaagtggtacgttttgctttttcttctgagatgggagaagcgtgctgtatccacagattcctagctggcacagttgactgtttatttgcttagcacatggcctgacacatagcagacactcagtggctgaataaacatggtaactgtgacatgtactcactttctctctcctgtctctgatcctcaaagaggaccaaatatctgccaccctgcatcctcagacggctcgtaactttggcaaaaaggggccaccacagagggcctgctgcagccttcccagttccctgttgtttccacttttgctacctgaaatctaatgatttgagatccagtagtttgcgtcttgaagaatatttggaaattaaggaaaatacaggtgtccctaagaggaaaaatactatgacccatcatcacagtaatttccaacctggagctcccacatgctgggatctcataacaggcataatggtggccagagagcacttcttaatatttcaaaacacctaatggaaactgcccatttatttaagataaggctgcaaagagtaactaaaatggcaagtttctttgctttccagtgaaagagtatcgatttggtatggtagctctggttattttttattttattattattatttttgagacggagtcttggtctgtcacccaggcgggagtgcagtggcttgatcttggctcactgcaacctccgcctcccaggttcaagcgattctcctgcctcagcctcctgagtagctgggactacaggcgtgcgccaccacacttgactaatttttatattttcagtgcagacagggtttcaccatgttagccagactggtctcgaacttctggcctcgtgatccaccctcctcggcctcccaaagtgttgggataacaggcgtgagccaccgcacccggctagctctggttatcctttgctgaacagatgcttgagttgatagctgtctatctgtgataaacacaagaatggaaggagagaataatgatcaataacagcttatgtgattgacaagaccttgccaaaggcagtgtggatgtggtgggatgggaagggggtctctgggaggggagagacgggggcactgcatgctacttagttattcctggggtttgttggcagctgcactgaggacagagggctccagacaggggcagagcaggggcacagagagtggtgtgaggctctaaacgccagcttggtcggcccactttgtcattttgctgagggctggtggaggtgccggtgtggctgtgccaggggccccgcctgtcacctctccctgcaatccagaccccatcacagagcccatggcagcggagataaatgcttcggcaaggcaaacgaatctagagggaatgggagcctcaagccgtgaaaaatgatggggactgtggcctactttcttgctttgtaagagtcacttgcacttttctggggcacagccaaactgacggtgctgtagaacaggatgtgcgagaatgctgtttggcaaacaaagagcgctctctggcccccagaggttctggcttttgagcccagactaaagaaagccaggctggagaccgtatatcaaactttgcaagcccgtttatataccttgctggtgcctcagggggcagaaatgctggttggggatctttgtgttttgttttgaaagagtgatgtttggaagcagaagcactcaaaaatatatcctgacctctggcacttagaacctccaccagagcttggcacttaactgttctgtttctcgtgatatgttctaattatctgtttccagccagattgtaaggtcaacaatggtagtttatttacgagtaagtcttagttttctcatctgtaggaatggggataaaaatgcaggtttgctatgagtgttaggggttcagggtttagttttgggcctaactgctcctgtctacctgtctacccttccagggcctctcaggacacaccttactcccaaagcacaatatccaaatggcaaagaggttgtccctttcttaatgagctccacaagcacctgaccaccaccccctcccattcgaggcctccctgtcccctcccgctgaacctaaaccgctctgaggagcagctctccagccatcagtcctgcttggatgaggatgctgattttgtgtctagggaaacaagtctgccccgtttgccttccacatggaggctgagggtacaagagaaagttgggggaaatagcaagcaaagttcagagggcagtggtccattttttcttatcagccacaaaacaaaaaataaataaaagaaggaggaggccgtgtctttgaggcacagtaagcctgcccactgaatgtccctgagagtaactagttataatagctactccttctacagggagacctagagacggggcagagagaggaaaggacgtgcccccgtgaatagcagaggggtgaacagtaggcctgggggagaaattgccttcctgacaagaagagttggagatgatgaatacaaaacccctgggacactgcctggcccatagtgatgttaccatcagtagtggctttgccgtttccagattgacatccatgccctaaacagagaactttgctgagatgaaatttccttgttggtatacttttgtgaaccactccattgagaaccagcacaaagccattgccttcttgaacgtcttcattaaaactagaataatctctgcccctcatttgcccatgcacatggaaaacccacggatatgccttccctgatggaaaatatgaccactgactggagttcgagaccagcctgaccaatatggagaaaccccatctctactaaaaatacaaaattagccaggcgtggtggtgcatgcttgtaattccagctacttgggaggctgaggcaggagaatcacttgaacccaggaggcaggggctaccgtgagccgagccgagatcacgccattgcactctagtctgggcaacaagagtgaaattccatctcaaaaaaaaaaaaaaaaaagtgaccactgaaatgtgtataatgctttaaaattgacagtgcattttctcatccatcatttgagcctcacaacagccttgtgacgtaggcagtattcgtattctcacttcaaagataaggaagcggatgctggaatggcttgggcaccaggccaggttcatacagtaagtaaatggccaaggcagggtgtaatctttggactccacacccagcgctccttttttttttctgtcatctgtgatgcttcttccaccctgctattgatagcctaggaacaagatgtgtgacttttcttaccaccccctggtgggtacatcctgggtacacttttctgttttctagtgggggtaaggaaaatggctttcagtggtgaaggttcacagaaagaatgggatccagaagcgtcttccagcatggtccaggtgccagaagactttggcaggcgagttgaccatggctgagtcaggccctcctcccccgctccctggattttggatcgattttgcagcggctctggcggctgcatgtgtttcccttggcctctgaggcattccagtgatgatgatggctcggcggggtcacggccctgtacaaagcaagggctatttgtggctgatctaaaacataactggagccacctgcatccgaggctggcttctcgggctctgggtcccataacccagctggagtaaaaagttcacgttcccgtgtggagtagataccaaaagtgacgtctctttctttctttaggtttggctgcgtaattggaaaaccaagctgcccgccaccttgccgtggcttcttctatccctagggcctggagtgggcttcctccctcccctcctctatctaaaccctccttgctgcaagaccctgctcctttcacggagtctccattcccagaatgtatgtgacctcattgtttgtcatccatgttggggcttttaagaatatccccttgcaccattttatgactgcttcatggacaataatcctgactgtgttctttggggccagacactgggtctgctttccttcctctctcacagtgcctggctgtgctgggtacacatgaaggctgacggttcactgaatgaggcattgtggagggcgtagaaaacatggagacctgggaacccagagaccaggttttgttgccagggcaaatccctttgcctctctgggttgctcagtccatatctgtaaaatgagagttgaactggatgatctttaaggtccatttcaaattcaaagttctggaactaattgtagactaagccgaagagatgctcattgcctttacctgtctctctctgctccccatattgcagcctggtaagctgttgtggcttatcacccgcacctctgatttgcctgaatgtaacttaaaaacttgtcttcataatatcaggaaggtcacaaaagagaatgagggagtgttgagtagtgtttagaagcagagactggggaatcagacaaacttgggtttcagtcttagccctaccacttaatagttgtgtggccttgagcaagtcaccttgttaagtaccactttcttttcagaaacatggagttaatgccagtctcacaaggcaatggaggaatatgtgagataatacaggtatggcgcacacacagtgtcagagctcactcaatggtggcagtcatcgtcattgaagtggggaggggaaagaagcagaggggtgtgttttctagtcctttggtgagcattttctgacttgtaaactattggttgcattttaagacagtgcctttatcattttcataagcagtgtaatgatttgaggaaaaccattttagttctaataagaacactagcagtactaattgtgcacatgatagcattttaatagagttccataatttatggaattgggaagacttacaaaaacatgggttgactctctagagtcttaggtttctggtgagtgattcaaacaggctgctcttgcttcctgccagtgcaaataaatcaattgtaaacctgcacttttaaacaaaattgtgaaaaaggaaacaaatccagtgataagaaactattttaacaagacacttcattcttgaggtgatttgctaaggagagattttccagattgtccctgaactaccaaaagcaacagacacactgtggtacttgcttctctttttctagctgctctgggtttaagtaactgaagccttctcaagtattaaatttggagggtggctcagtgatctaagcaatgaagacccaagaaagactttgggtctgaatcaaagttttccaactgccttgctttgagtgcttggaaagtcacttcctaaccttggatacctcaatcttaccaactaaaagagtggtagatggcgggatgaacatcgcccagctttagacagtgaaacctggatgaacttaacctggcttaagatgatccctttctgtttaagtggaaaatgcatggtgagtgaacattacctttcaagcaacttctggacagagtccatatgtgtgtgtgtgtgtatgtgtgtgtattagcctgaagttcaagtacttgcaaaggtttctagcacacagtgtgcagtaggtgagctagacttagttagacttaggacttccagatctcccatgtcttgacaattgtgtttaactgagttttaacattgactctcagagtcagaaagaattccagaagataaaggaaaaccagaaagccaaactttaataaatactcagagagcaaaaagaaataatggaaatggcatacgtgcagagggcacgtagttagtgaagaaatagcttttgatgaaacaggacagggtgaaacttcaaagacttgtcttttatccattaatcccattagtgctccagcgatttctcaaagattgattatctctggggaaatgtgttacatcagccctcagctttccagtcccattagacccagcaaacattctgtgctgctgggatgatgggcttctgtgccatgtttacccatattcctccagcttggccccctcctcaccagctccagtcaggaacagagagaggcctctaccatcagtagtcattctttgggattatcactcacacccctttggaagggaagagaaacataaagataatgggcaagcagcatgtgctcaggttaactttacattggctgatcaattcttcatatagccttgggcgtttattaggactttcatggtggatagacacactgtccccattcaaagtgcctctaaattagaagtgagatacctaaggagtgtcagcaatgaggaacaatgggcttctcttgaagtcttgctctctgtctagtatggtgggcaaaggaatttatcggttactaattttataaataaccttctcacagtctctgttttgtcatatgtaaaatggcagcaatgtaatgtatccctcatagcgttgttaggaggactaaatgggttagtatttgttaaatgcttggcattgtgcctgcctcacaccatacaggcactcaataaaagttagctgaaattatgttaactagtctaagcagaggattagtaggcacgttggaactgatgctaagaaggaataagactcaccttgggaaaagtggggatcagggagaagactaggcagcaggcttctgagtgtgggagtgtgcaggatgtgagcacatctctgcagtgcctgcgccctccttgccacagaaataacctacaccagacgtagtaacagaaaaagaacccaagcattttcaagacaatgtgagcaaggtagaaaagggcgacccatgagtcaacaatactcaagcttttatcagtctcagtttcttcattctttgtttcattcattcaacccacgtttatcatcaaacctgtgctgttgattgatgttatagataaaaatgaaccactccctactctcaagaaagcagaagaaggaagcaggtaagtaactagacaattatataacaagttcctgagtgatcaggaggaatgaagtgccctgggaaggcttctgggaggagttgattcctaagattagatgagtgagagttatctagtgaggggaaaggcatggatgacagagcattgtgtgtgacaaatccttgtctgctaattctcacatttaactcatctcagagtcagtctccattgattgcctattaagtatgggccatatttttatgtctagtaattttggattatattctagacattgttgatggtctagtgtagagactatggattctattatgtttctctggagagtgttgactttttattttagcaggcatttaatttgactgaactcaaacaccaaactatctcctccatggggggcagaagctgaaatctctgatcagttctattaattttagatgggttgcttggaatctgccccatgcatgtatagctcaggagtcagccacagatttggatggagtttatatgcagaatttggagcatcccttctgaggctttctccttttggggatttctgcttccattttccagctgccccaaccatttgctccttccattttccagctgcccttctgatcctgcagatttctatctagtttctaatcactctatatactacagattgggttctgctctcaagcaaaaaactgtgaaacccagaaactcatccaatgctcccttctcccaggttctgcctgctttgagttgctctctagtgcatgcaaataggtatttttaattttttgctaagtaatagttatgttcagatgataggtccaatatacactactctgagatattggaagcaaaactcccacaatggatatttcaagaactgcaagtaggtcagtttgtgtgtgggggggagtgtttgtgtacatgtgtgcatgcgtgtgttacaggggcatggaaatatgcacagcttaaagaaaggcagaggtcagatcatcaaaagccttctgggttatattaaggaatttgaactagatcctgaaggctgtgatggagagctttaatcttaagagtaaaatgatcacaactgttcttagaaacattgctgggcatctgtatgaaggatgaatcaaaagaggtagaaagataggggattgatggggaaacagaattcagtttttgtcctctggaagatgaggggttgaactagatgatcattaatgtctcttatggctctagtattccgatcttcccattaatgactttacttggtcctactgtagccaggagttcccacaaggctgttttttgcagagcactatacacagcccttgaagcccaggctttaaaaaatgccatttagtgatattttatggcttgtgaatagattaaggtaatggaggcacaaaacaacacaaatgaatgcaccacgggtgggtaacagcctttgaatttctccagctctcccttcagacctcctgtatcacaacaggtatttggtcattttatgtgatcttaaatggcctactattaacctgactttgattttttttcagtcctcagagaggtggaggtgggcctagcaagaacccaatgctagggattcattgcaaagtgtacccaaattgggaagggtgagaagctattctatgatggtcttatgagaacctcaggagatgctggtggtggtgtgatgggcatgttggtttcatcctttcctgtttctgaaccaataggaaaatgaggcttcctgagcctcaggatgccctaccctttctaaggcttcctggagagcaaagagttcctgctctgccctggtgtgagtcagagactgtgatgacacactgaacagcaacacctgtccttgctggggaggggatccaaagtccagccgctcgccttcagcatgacacatttttctgtgctttgcctcgttaagagctcaggtcctttagtgcttgaaagtagctgagtgcaccacctctgtaaatcgatcccgcactcagttcgtgaaacatcaggttttaggaattggagaggcagcaatataatttttgtgtgctgttgcttgagtgaactgtaaaccaaggctttctacccaggattgcacggctttttactttgatgaatgtcattttactcagagctgactaaatgatattgtcttatatggctctcaaatttttctctgatctgttcccaatctgaaacgtgtgagtacatcacttcagatatttgctaggcatctgagcttggcctgaggatattcaccagcatgattgagaaaacatgcttgtcctcaggaaggcccaagtctaagcacctgctcatgccccttccttggctgtgtggcttttctacgctgcaaaccaagcttgtagacatggtgtacctttccataacaggtctctctcttctgtcatgttgtggtcactgaattggatttggcagaaataccagaaagtggaacatgtggtcgcagcatgtgaccttcaagtcaggtcacggctggcatttgccagcctctgtttgttggttctggtggaatcaggcctatgtgtggactctgctcctactatttgagggcattgtgaggccttttctgagtgtgtctcctgcctccttgactccgggcctgaagtttctgccattgatgtaactcatatgtgttacagcattgcctccagaattctcctatttgtgaaggcctattctgttagaacaggttgattgaggagcacattacctacttctggtgctccatctggggactgtggacagcagaagagtggggtgaggtgagcttgaggggttgagggagagtgacacagaagagcagggctggctcccctgaaacaggaggctcccctgtcagttgtggcaggctctctgcctggttttttccactcctttatccccagcacttaacctcatgtttggctcatagtagatgcttaggagatgaaagcctcatgtccaaccatggccaacagttaaatctgtgaatctcaggcttgatttcagcttggccaggtctgagtcattaaaggacgctttgcatttttggatagtggaacttttgccatcttattctttttccatggtgtcatggctttggcatgatcagggttatgaaaaaagggggataagccctctactctgctttacctgccgtgactgagatcagacactggtttttagagggaaatgtccattttagagcaagagagagaagaccttaagcatgacctaaagaaaagagagaggccaggctgtcccaccacttcatgcttggttgactgagccaagtttgactgcaagactgggtcttggcccaggatggagaatattcactaatgaggcaattgacttcaagaagatcaaaataattagtcagttttcactgctatagtgagtcacccttgtgaagacattatgttccaactgaagagtgagggagttgaggtggaagtctcctggctcctgctccctggggagtgcagagtgtgtctagaagcctgggctggtaggccatggagtggggacctgagctgtttccttctgcctgtgctttttctctttcctctcccacgttcactgggaagcaaggaagttgaggacacgttacctcagtacgtaccacaatacgcattagaggtctgcttcctaggcccgtagattctagggagggcactccaggcctgcaggggccctgaggcaggggttggtgggcatgagaatgggacccacccctgctgcttgggagggtatgtgttgcccttggaggcagggagaagggctggtctgtccctgtgcttgggcactcccatctgcacagtgccctgtggcagggagagatggcctcagagcctgtggttcctttaccgtggatggcttttcacgtgtggggctggattgctgagaacatcttttacctggcggatccctgaataggtgaggtggactcgggtctggaaagttaatttacatcttttctgaaggccagggaagggcaggggcagcctgacctgtcagggcgatacagtctgtagctgtttggccagagtgagaggagtgtctgatggaacaggacttgccttggaactgagcaaactggccccgtagagattaagccttggacctttgttcgcctgagtcccccaccccagccagctcacagataggaggctggagaagggagtggggtggatcacacgccatccccacatgctctctgtgggcctgttctctccacgtgcgaggagggatgagcattctgcagggagtccgtcaagatgagtccatggtggaaaagctcacagacggggaggtggggactccacagggttccgccatttcctgggaagggaaccttaggaatgtcacttaaactctttgagccttctttctcttctttcctccctcccttcttcgttttctccctctcttccttttccccacaaatattttctgagtgcccatcaggagttgtaaatgctggaaatgcagtgaagaatagcatagacaaggctggtgctatggcaggaagagagggaaaaatgaagcaaacagctaagtcagtcagactttcaaatacgggtaagtgctttcaagaaactaggataacaggtggagaggggcatgcgactatctcagatagcagaggagaggaaggcctccccgagggaattccacttgggctgtgaccctgtgataaagagccactcatgataggtctgggaggacggccactatgcacagaggcagcagcacatgccatggccctgaggagggaagaccagtatgcagatgaccacagggccctatgggaggacagagaccagtctctgaaccgagctgtgggagagcgtgaatgcagggttgttcctgctttggaccgtggacaataaataaactcctattgtgcctagaaaccgcctcagtgttggggtgtgtttgctgcagcagctagtgccaccctaacgactgcagtctaatcattgtgtgtggcagtacacacaggacctgaagcaaccaggagcttgagcgcagggaagtaaagctcattatcacctcagcaacaggggccctgggagaaccaaaggcctgctcctctctgccgctggctgtttctgctagtctgagccagaggctctatcctgctgtaatgtcagtttaaaaggcagcctttccagactcttgtcacatcaccaggagctcttggtcctctaattaagtagtaatgtgcttgtccaataagtgccatatggttgcaatgaatcaaacccaaattatcttagctctaaaaattaatattactaattatgataatctcacaattttatgtctgcttttcttctgaagagctcaaaatgcaagtattaaaataatatgtccaaatatcctacattaggaagaaaggaggacccacggagaagttgggaagatggcatccaacgttaagataaggctcccgtctttctcttgtctttatctctgacttcataaagatagctagtctttcctggcaataagccagaatagtgataggattagggaaacgggattatcttaacgtcacagaaaggagatgaggcacaaataagggaatgaagctaattagatactgcaaaatgccaagattggagaaaactggaatagacttaccctgatggaccttgtctgtggagaacggatatagggtgggtccagggagactggccagccttggctggggcctcatgggaccagaagtggcagtggacagcagagttggtgaggagctgggagggggattcaccaggaaggactgagttctgaatggcagggacgtttgcagacaggagactggcgtctgtccaggagagagcagggcttactgtgagcgagggaagcagtgggatgagtgtgtccggcggtgtctcttacttaagagtgacaaaggaagagtgcaggagtttccgtgtttggccctaacccaggtccacttcactgccctgagagatgtagtgggatgatggaggggactgggggcagagtggatatttaagtctgaggggagaagttaggaaagggttgtgggtcacagaattagagagttaccaaggaaactgcagagaccattacttagtcagttctccatttccaggaaggtttgtcaccataggaaagaaattcattaaccttttattcaacgggtattaattggctatcatgtgcttttcttaccccacaagagcttatgatggaaggtgatcatacaatttatcatccaaattgggatacatttgagaaggaaaggcggcagattatgtgggaacaaagactggcccatgccagctgggacatgtggtcaccttacttatgatctatgagatgtataatcaccccatttgttgataccaggtgcagtgagatgcatgctctatgtgcagtgtgtgttttcaccctgtatccccatcttctgctgggagcgggactccctttctccccgcctgagcctgttctcctcagtagcaggatccagctcaagccctacccccacctgctccaccacaactgccccactgccaccaccactaggcttgctccttaacctttctgtgcctcagttccctgatcagtaaaacggggctaactatagtacctactactagaactgtgcctgactcaaagtaggcaccagatgtgtcctgctatgatgatggggagccctgtgatttggtaacttccccaatctctctgcacttttgtttcctcatgtgggaatcagggacaatattacctaccttttaagggcctggaatttaagaaaaattagcccccttcccccttagaatcagcagcagacatcaaagggcgagttttaatacttcccacacaagttcacagatttattacataatatgtttagttgtggttaaagaacatctaaggggcgaaggagctgcccaaggggaaggaggcagacgagagggacatgtgtggctttgcatggaaaagggaagtggtatcccagataaatggtggccagccttcgagggctctcaggcaagagagaaaactctagacatcaccagtgcctgggctttgttgcaggcagaggtgctttctctagaagggaaagcaagtccctatagtcataaaatgagcagctcttcagctgctagtacttgacctccaaccagaattgatggggtgctcagaactattctaggtactttgaatttttttaacctcattaagttcatctataagacaggtagtttttatattttaaaatgattttataacagaaaatttcaaatgtaatcaaagagacatagataatgagttcccgtgctccagcttcaacagttataaacagttgctgatttggttttatctatttccctcaagatttttttttcttttctgggatgtttggaagcaaattccagcaattatataatttcacctgtaagtacagtttacccttgaacaacatgggggttagagatgctgacccttggatggtcaaaaatctgcacataaattttgactcccgcaaagcctaactactaacaatctactgtttacctgaagcctgactgataacataaacagtcgatgaacacatattttgtatgttgtatgtattatttagtgtattcttacaataaagtaggctagagaaaagcaaatgtcattaagaaaatcctaaggaaggtaaaatatatttactattcattaagtggaagtgaaccattgtaaaggtcttcatcctccttgtcttcacattgagcagactgaggaagagaagtaggaagaggaggaggaggagggcggctaggtcttgccatctcgggtggcagaggcagaagaaaatccacatgtaagtgacccacgctgttcaaacctgtgttgttcaaggtcagctgtactttggcatgcatctctaacagacaagatttaaaaaaatatatatcaccaaatgcctctatcactccagacaacaataacagtaaaacgcaagagatccttaacatcatctaatattcagttcatatgtaaatttcccttattatgtcgaaatatctttgccggttggtttgaatcaggattctaataaagtctacacattacatttgcttgtaggtttgtaaatctctttttatctatgattgttccccctcccattttgcatgtcatttgtttgttgaagaaactaggtcagttgtcctgcagaatgtccctcattttgatttggttggctgcttccttattgtcccttaatttattccttcatcctccatgttttctgtgacctcggagttagattcaggttccgtttgttttgaagggagggtcaaggatgtgccagctgtggttatgccccttcctgttgtgacactgagatgggtgggtgggctccgggattggcagcctcatccttcatctattactgaggccccatcagcctttcccctgatggttttcacatccattgacgattgttgcccagatccattatttcattagggcttgaaatgctcattttctgattctgtcattccttttgcgttgagtagctggaattcttctataaagaagaacgctctctcatcaacagtttggttaccctgaaataccatgtggcagaaaaagcaggacaggtgctttctcatcacttaccggctttcaaagtaatgagttggtcccttgcaaaggaggataggtctttaattaattgattaaacaagtatttattgagttcctgctatatgctgggtatcgttctaacatcctgatggttcagcagtgaacaaaacagataaaaatccctgcattcttggaatttacattccaatgggggaagatggatagtgaacaaattggtgtgctatatatttagttcagggatgatacaggctatggaggaaagcaaagcaggacagggacatgaggatgctagaggggtgggatgctagaggatgctaggaatttgggtttgcaatcttgaatagggtaagcaggctcaggaggtgacatttaagcaaactcttgagaaggtgagaaattgctggagaggagcaggccaggcagaaggctggagtgcgtgaggtagggatgctggtgtggagcccgtgtggggaagatggtaggagacgggcctagagaggtggttgcaggggcagaccaggcagagtcttagaaaccattttcagggccttggttttcccctggatgagatgggcagccctggaggactgtaagcagaggtatagtctgactcacgtttttaaagggtcctgctggccgcttggggagaagatggagaagtcaagtaagggtagaactgagtttaggcttgaaagcagagagccttcagccctggtcaagcttccttccatgtcagctagggcctattgggggggttggagctggggggcagcaagtgcttcacctgttcctaggggttctctgtgcatgtggcattacaggaaatgcttccaactcaatcccgtcctttaaaattcctaggcatagcattctcgagcgcttcaggacataaaatcccggagcagaaaccttcctccccgagtctctaaacaatggctacatgtccatcaccccagagaactggaattccattttatactgaaagtgggatacacgaggacaatgctatcacttgacccatcttctttcatggttggtggtgagtcttttggaccgtctttaccatcactgaagaattggcattggctagcaaggcacattcagggggaacttctcatgattccagaactcagcatttgtggtgggatcggccatcagtctacggagggtgacccctccacccatggccaggtcggcttaatcaataggtgtctgatggcataaggtgcagagcaacagggcaccttttcctttccatccagattttcccagccagcttggagagcactttttacccaggctgccttcccaacacccagagagcccttctgtggatgagcatctctccttgcctgtaactctctcctatcaaaggctgctcgtgaatttctgggtgcttagcaaccaggagaggggacgatacaagccgcctctatccctgtcaggtagctgctcccgttgttcgtcttctcctctgggtttgtatatgcagtgaaagtagccagagagacactccacctcaacttaaacagcaacttcctaaataaataaaaaatacacagaatccagttcaagcagatcttgcctcaaagacagcttgaaagcatcccttctcattattccctgcctgatttccagtgtttctctccctttctttctttctctttcttttcttgtctttccctccctccctctctctttcttccttcctctcctctcccttccctttccttccttccctttccttccctccctccctccctccctccctcccttccttccttccttccttccttccttccttccttccttctctctctctttctttctttctttctttttctttcttctcgctctgttgcccaggctggagtgcagtggcacgatcttggctcactgcaacctgcgcctcctgggttcaagtgattctcctgcctctgcctcccaagtagctgggattataggcttctgccaccacaccagcctaatttttgcatttttagtagagatgggattttgccatgttggccaggcaggtcttgaactcctgacctcgggtgatccatccgcctctgcctcccaaagtgctggaattacaggcatgagccactgcccgtggctgatttccagtgtttctatgtaaccctctgagattcccacaagcctagcatgaagatgagacacaccaagggaggtgaggagctaggagaagggcaggcatctccaaattgcaagtttcttctcaaactgcagatctgcagagaaaaggaaggacacagtgaaggaagcagattctccaaggaagggatatcaggacttaggaatggactctttgcctcttattaaaaggaaagttgcttgctggggaagtagcagattatttcaaatgggtatccgtccttggtagccaccaatatccatcagtttaacaggagaggaaatagagttgtcatgccaggaggattttggaggagccagcggctggctatcgagaagggaagggagctagcacttgctgagtttcttcaaggggccatgcactaactgtaggaagcatggactttgctttttgcatgggatgaacctaactcagagttgatgctgcatgtaggattatgtttttccgacaatccagggatctgcagaaggcttgctacaggatctgagcaggagtctaagcagttgtcttgtggtatcaatgctcctgtgtctggagagctggtcgctaagacctggagtctgggccccttgtgggggtgtcacagaaggctgtgaacacctctctgctcctggaaaatgccttcctttcctggccccaggacagactctccgacttccttcatgaccgggttcccactcgggagcctttggaaccgcttgagtaccagattattaacaggacccgtgattgtgatttcttcccccgtacaaattcacagaccctgagaagaaaaggagaagataggctgggcacagtggctcttgcttttaatctcagcactttgggaggccgaggcgggcagatcacccgaggtcaggagttcaagaccagcctggccaacatgacaaaaccctgtctgtactaaaaatacaaaaattagctagttgaggtgacaggcgcttgcagtcccagttacccaggaggctaaggcaggagaatcgcttgaacccagaaggtaaaggttgcagtgagccgtgattgcaccactgcactgcagcctggttgacagagcaagactctgtctcaaaataaataaataaataaataatttaaaagaggagatagatgtgatggcggtcttttctgtacttagaacaacctaatagttatttaatggataaacaggcattaaaatgaatgtttgatgacttggaatccagtcttttataaaactctcagtgttctgtgattccaggcactcatggctgtggcaggcatcctgccaggtggagctgggagttcagcacagaagtaagtcggggaggaggtatgcattgccacagacttaggaagtgttccctggacctgctgatgataggttggtcttagccatgttcctgaacaagtaagttgtctaatgaaaggaaaacataccaacctgttagtggagttagcaccctagacccatagactctaaggttggaaggacttttgaagtcatctagccccttgccccactcgatgcgtgattaatacgcaccacagaaactccgggctctgaatactgaacattgacccagacccctattgcgttagaaaatattattgcaattagtggaatgctgctagaatattggctccagacctgagtctcaaagttggaagagatttagaaagaaggatgtccagaggaaggaacagacatgagtgaagttggaaaatggagactggcaaagagtagctcgaaaaagaacaaagtttcctaataatgaccacaaatgagtatttggctgttcaatggatatatgcttgctccacgctcattggatgctagcctgctctcaggaagagctcttgccttcctgcctccaaaccactgtacacaccgttgctagattgatctcccaagaatcagcttctaccatgctctttctctgcttcaaatgaaattttgatcatttctcttcatctgacaggtgaaaatcaaaattttctgagcttggtcctcaaggcccttccttctccactcatcctttggccaggcaggccctccaactgcctcctgagcagcctcactcaggtctttgctcatacttgctagaatggagagcacgtcttctcgttccctgtaaccccaacagtgtctgttgtaaggttgagcacacggtagatggatggatgaagccttcattctgagtaaacacgcatgcaagtataaacacatacctacacacagaaacaccacacactcttaagtgtagatgaagagaaagaaccctttctttcttccctggtgtctggcaaaggccaaaggggtggtggggaaagcattaggatacagaggctctggttcttgttcctccctggaactggcttctgctaggaagcccagcagggcctgagtgctggcaagcctggcatggagccctcctgctttggaggaagcgaaatgtcccagcaggatgagtcagtgggagaatggaaccagaaagtgagtcattttgggagcagaggctaaaggatcttctctgctcaaagatattttaggtcttggtaggttttccccacttctcttgtttagatataagtttggggcatgtgactacagtggctcagttcccagatgtaatgctgagagactgtccagtgcgctgcgttctagaacatttttgctgatagggaggccgtaaagtgaggggctggttttggagccaggcagattgggttctaatcacagcgtgtcccagaatcagctggggacctagagtgagttgtttaatctcttaaagtatagtttttatcattttcaaaatgagggttgttggaaatgtcaaatggttgttcagcaagtgtttgttgagtccctagtgtgtgtctggcacagagctgagtgcagagtatggggtgctgaatactgcagccacgcatcctgccctctggggacgggtgcagcttgggattgtgttatatttgtagcagttctgatgacaacaagaataaaataaaacacctggatttgtttcatgaacataaccctcaaatctgcactcccctattacgtgtttgggcaactgagttttggaacctacatatcagactcaaatgttttcttctggggggttacagtctggggaagacccctgtgtaaagcatgtagcatagtgcctgtggacaggagagcccagtccgtgacggcggtaacaatgatcattactacctctgttatttcctgtagccaactgacatctttgcacctctgtttcctcatccagaaaatgttcagctgaattgcagtcctttcacagaggcagttcctgagtctctagtcttggggctcatgcttgaagttatttagagaatctctaagatacaagtggagagacagctggaaggggcagcacccaggccttcagtgtggggacagagttaagatcaacatgatcacagcagactgacacggcgagctgaaacaaacaggaaaacatttgagcctgatgttaggttccaaaactcagttgctgaaaggcgtaataggggagcgcagatttgagggtcatgcccatgaaaacaaatccaggtgttttattttattcttgttgccatcagaactgctacaaatatgacacaattccatgctgcacccacagaatagtgagtagtgtgtaggccagggcaagaaaaagaagagcaataatattctagttattgtaggccaggggacccacatccacgatatcgtttttttacagctcattactgaatcctcacaataaccccatggggtagatattactgttattacccttttatagatgagaacactggagcttagcgagggtaagtaatggactgcaaggacactctgtctctggcccagaggaacagctggaggatgcaggcaagatgtgtgttaagggggtcctgcagagtgggggtaaactgattctggattactcattaatgtagaactccgaccagtgggtggagggtatgggttcaatagggagctcttcagaaatggaacatgttgagaggccaggagttctccatccctgaaagcattcaaggagaggttgggtggctgtgggaggtattggagaagggattttaacatcgggagggaactggggagattgtgtgtgagtttctgtctgcaaaaaaaaaaaaaaaaaaaaaaaatgacggtaccaaccttgaacccatgtaatcttcttcagtaatattcaagcaagaacagccaccataaaattgtgtgagcaaatcaggtaatactggtgaaagccaaacacaggctccccgttgtgtgagtgagaacatgacattgttacagtgatgggttcatgcaccctggggtgggtatgctgatggtttcttctgcttctgcttctacgaggcccctctcccaatgcctttcccaaatctctccttatggggtttttttccccctcctaaaccaccttaaatcgaaatccactcacatttgtagccatttcacagtctctttgcatattggtgagccctgtcgggggtcgctggtatcttatagtattgatgttacaaaatgtaaagttactttggggaaatgacttctcttctgaagcttttatagggagaaggtggtgagcttacccctacactctctcctttcctttgtctaattcctccacagaacatttgtccggtgctcactgtggactggaagtgtgctagggactgtgtactgcaaggtgactgggatgtgcgcctgagcatccctgagtccaaggtaggggaaagaggaagtggtccacgatgacactgtgatgacggccatcctgatgaaggcacaccccaccctgcagcggctcagggaaggggcgcgtgtgcagacatcttgcaggcagggtttagatggtgctgtcctcggaagagaggactttggaagaaggtggtcttggtttcggtccttagtccaccggatgccaggtaatccttaacctttctgagcctctgttcttcacctcttaaatggggatatcacttcccccagatgatcttttattttgtttttaaaaaattattatttttagtatttttaatagaaatggggtctcactatgttgaccaggcttgtctccgactcctggcctcaaacaatcctcccatctcggcctcccaaagtgctgagattataggcgtgagccaccatgcccagccccctgacgtgatttctatgaaaatgaaattaaatgagttaatttagggaagccacttaacataattcctggctcaaaaaaaaaaagaaaaaagaaagttttcttcccttcctgaccttgtaggagaacagagctccttcgcctgaggggcatgagtccctatgcagaggttccctaacacctgctcataggtctgtgtcccgctgatctggtaagcaccgggaatggtctcttaaacacaaagtttgggctgccttctctagagattctatttccacaagtgtgggaaggggctgcacgggaatcagaaatgtttccccagtgattctgatgcatagttcagtttgaagacgtgctaacaatatataccaacaaaagttgtctgcgtctttttctggggacagacccccccccggctttcatcagaatgtcacggtcccacacaaatgaagatgcatcctctcatggtatgtgctagcgggcacagagagtggggctggagaatgagggcttggtaggcgaaaggccccagggccagccctgctctgccctcgtctcttgccttcccgccaggtgggtcaggaaataggaacaggtggttagtcacggggctctccagcaggtagggcagtggctgaggaaatagcggtatctcatcagctctgtctctagaggttcttaagatacttagttgtcaccagcctgaaaagtcagcgtggaaaatgttccagcctggttcctgtaaacgtaaaatctgttatgaattatatccatccacgtggaagagggagacagagtgatctggtatgtgcaggagagggccagcctctgcctggtctgaaagcttttgcaattgttcctaattggcccagtctttttctgcaggaatctcctctcttttctccatcccatcccccactgcctgcagcttctgatttcttggcaaggcaagcaggcaccagagctggggctgcggttgttctgaaggattttcaggtgtgcgtgttgaaagccggcaggaagagaatgctggctctgtgtttagcagccgaagggacttgttatttaatgtgtcttctgaagccacgaggcctcggctttgtaacttgctttctttattcttataaatcttctaggatgctccatggactgtaggaggagctctgacttcccgaccatacccttgtgtttaccactacagggacagaggttcacagctgcttctggttgctgtagatgatctggttccctgataatttgagataagtttgtgttagtttggagtcttcggtgaatacgttagggtacatgtttcttcgtcgttcctggcagggctgatcatagaccacatcaacccaagaatgtgtttgcctctctgatgaggctacatctagaatatgaacttgtcgagtgcttaagtatctttctacatagtttattcattagcctgttcatttatctgttcaacaactatttcttgcttgtcaaccatgttctaggcatgtcatgggctctggaagcagagtgagaagcaaggctaagtcctgggctcacggaacttaggttctaatgaggaagacaggcaaacaaggcgccgtggagaggcaggcagagaaccttgctttccaaccctgctcagaggtgcagtctctttatatatcccacttccgctatccccaaacatgcccattagcactgacatctaaagggctcatggtgaattaaaatgtgaccccacctctgggtatttagtcatttagtattgaactggggttaaagtcctaaggaaaggcatgtggagctaatatttttggggggacaggccctactggcagccatggaatcttactccgcgtggctcattgctcctgggctttacaactcaacgcagctgtagttcattcaccatgctgtggccaagcagcaggagttcaaatgtccccactgccatctccaagttgtctctctcgggttcctatttccctggcttttgtcactcccacctcacctgtggcccacattcttctctatttgaatgtgtggcaggcaggcgagatagacaatggggaggagttgttctgcaggagagaaggggacagtccttcctccagcctggagcacttcctgcaccgctccccaccccgtctactctccatatcccaccacgccctcagggccttgccctaaccccggaagcccacctgtctcttggctgaaatcctatgggctgagttgggtccccccaaaactcatgtgttgaagccctgtctcctgtacttctagaatgtgactgcatttggagacagggtctttaaagaggtgattaagttagcatgagaccattagggtgggcctactccaatatgattggatttataaaaagaagaaacttggacacagacacacatggacacagacacacatagaaggaaaagcatgtgaagacatggggagaagaggggcaactgcaagccatggcgggaggcctcatgagacatccaccctgctggcaccttgatcttggacttccagccttcaggaagttcatttctgttgagtaagctgccctgtctgtggcactttgtcagggcagtcccagcactgcctcctgccctgtctgtgtggccctgggcagaagcggcctgggagtgtcactcacccttcctcctgcaccacgtgtctttgcccggtgggctccagccgcgcctgggcagcagtctagacttcctgcagtctctcaggcttctctgtggctgtcccgtgccgagcgcccaatgcacacttgtagcctgattgattggttttctcagccagggcacggatcgtttcctggccgctctctggctccttttccaggcacctcactcggttccctactctgaggtggctacggccagactcgcctcagcagctgcctccactacgggctgtggtttttggtgagcttctttcagtcctctcatctttatgggaaaactgcccagcccaggaccaattagcgtgggatggttgcaataaaggtctcccttcccgacatgtggccagcacagagccttccctggttccctcccggcatttagtcacagtccccagctgtgtggtcggtcctctcggctcatgttatgggtggccgggaaggcaggctgtcttgggatctaggcccaagtgactaggtccattgtgggtgaggcaaggtggccacctctgcatcctcctaggggtgtcctgaagcggctgcgggccatgggcaggtggccgctgagggggtaagggttcctttcagtgtgaaatgtgcctgtacccaagagaacttgccttcacttttttttattttaaagaaatgaagggagaaatagagactaaaaaccctgggggtcagggtctgtgagacaaactgagatgtgctggagacattgcttatggatttattgatccctgacttgttcataccatgtgcctggaattcagcacttacacgtttccatagcacaatggacatcagtttaatcataatgggatttcttaagtgattactatatgccaggtactatgctaagtcagttatcaacacgacctcctttaatcctttcgacaatccgatggggaagctctcattagccccacttgccagaagaggaaactgaggctcagagtaggttacatgactaaaagagcaggggctctgcattcaggtctgcctgacccagagtgtattatcttaaacatatgtgacacttcttgcttgccttcctggtgctgcaccatctgtttttccctgtgaggtcccctttccccacaaactggctgtgagcacacccgacccctttcctgtcctgctgcccccttgcctgtcctgctgcccccatccctcggtgctcagcttgttgccagcagagtcaaacacacagactcatggtaaaacgttatcttacatttgtgtaccttttcatgttttcagaaccttttccaggcagtatctaatttaatttttaccatcattctgtgagtgaatattttctgtcttatggttggggaaactgaggtcagagaggttaaatgattgcctggggtggcactgcctagcctctgtgtggtggagctaggacccagtcgaggctcggagttctaatccaccagtctaccctggtaggaacctctgtgcaaagccagcccccatagcagcctctctgtcttgggccaaagatacaaatcagcaacggccaggaaatgatttgcatgaggaactgaggtggggcggtgggcaggagagaggctgaggcagcaagggacagagtgggcacacagaaacttccctctggaggcctcagcctcttcccaaggctgagcatctgcgcagggcttagtttgttcattcctgggagctccaggtaagtctccctctcagagggaaaagctgattcttccaggcaagggtgaagagacccacctttctgagtcagtgaccgacaggccagagggctgaagatgtgggcactgcggtgagaaccggagtagccaaggaagcagggtggtccccacaggggcggcgattggtttgtggggtccctgcctgtcctccggagaaagattactaaggagcaaaagccgactttgctcggtgacccctcctggtgccacatccctcatgcctgcagcagaaggtggggggctccaggcccctgacaggtcatcctgatctcagagaagagtctgctgcccccaggacggggactgagctgagggcgaggaggatgccaggagaggcaccttggcccctgctgtggtattggccacaggttgggagctgcctttccccgaagccctagctttgcttctgtgagaagcagacacccagcagcataagcagcctgcctaggaggcttttcactaggaattaaaaacaccaaaaaggaacttcttatcagcaggtaccctaggggccacatggactggtaagtggtatcttccccatggtctcttaaggcctctgaagtcccagaccctcagatagttggcaactctgcctttccgcatatcaaacatctgaaaatgcatctacctcgcacatcaaatagaatatatttgctataacacaattgggaagaatggttgtattttttataatgttgagttttattaagaataaattattcattttagtcttgcaacataaactcttattctgatagataactatggatcgagatgcatttgactagttggcacaatgttaatttttgtagatgttgtgtgaaatatttattttgattttctagttttatattttggacccaatctagttttgtttctgattttcacattttttttcaggacagtgaaaaagcttataggatataagagttgaacctattgcacctaatggataaaatctcttctgtctctccccatccccagagagagagaaaaaataaaaataaaaagagaaagacactgtttcagcaaattgatattcggtttttaggcctatattatacttgggtctcaggtcctctaatctcctatttggtggtatccttataaaatacaagaagtgttctctgagaaatgtggaaaatttctgacgatcccagatgatactaaatcagttgccccaaatcctttagaagaaggaagaataaggccaggcacggtgtctcacgcctgtaatcccagccctttgggaggccgaggcaggcggatcacgaggtcaggagatcaagaccatcctggctaatatggtgaaaccccgtctctactaaaaatacaaaaaaattagccggccgtggtggcgggtgcctgtagtcccagctacttgggaggctgaggcaggagaatggtgtgaacccaggaggcggagcttgcagtgagctgagatcacaccactacactccagcctgcgcgacagaacgagactccgtctcaaaaaaaaaaaaaaaaaaaaaaaaaagacacattcccaacgtgaagcatcaaacagctcagcttttctaagtgttgggagaagtggagaacactggttctcctgggatggtgcctgggttagcaccattgtgtggatctggtgtaacctgatacaggatttctccccttgcccagtaagagagccttgtgctagatggatgcagcgaggacagaggtcccttgctggctgtgtgtgcaaatattgagcaccaaatggctaccagaggaatggggaagaactgactcgggataagagtgggatgcgtacaaggagagaaggctggagaaaaccttgcacgctgcgggagcaggctccccaggacgtgtcagaagggcccagtccatggaaacagggagacttgccatatgggccatcgtggctgcctgtgtggggactgaagctgggcgctggctgctgcgcgagatgagggggccaggtccagcttccaaagggcagcttccaggcagagggctgctaactggctggaaaactatcagcgtgtggagtggaaacctgtaggggcagggaaaccaaggaacatttggccatcttccgccattgtgatttacctgccataagagaagctaaagtaaaacagcatgaagttgtggccagccccattaaaataacgtgctcattaagggctcttacaactagtgatatttaaagaagaaagaaaaaaactcacaaaagtacttgaggcaattatctacagcaaaagaagatgcagatcccttgagatcactgacgcaagagaacaaaggaggtcccaaaagaggctgcctgtgatccaggtgagagccgaaaccttcaaggctgggtaccagtgcttcttacacctgagtgaagcatcttgggacatgccttgtggttcaacgttaaaggaatagcacagccaaccagaacctgctctttgttaatggaatggaatcctctttctgcactaaaaatgagatgatgtgaaatcctttaaaatttattggaaggagggagggctttttgtgcatgatgcgttaccaggaaatgacactgtctctctccttattgcctaattagcaatgttgtacttctgtgtgaaatggcgtgtttaaacattgccaatcgatttaaacaaaagatttcaaaatactgtaggatggagcacagtgaaaaattccttgccagccagcgttctcccaggtaaggtttttgtcattcaaggtgtggctgcacagcagggaaggctttgctcatccccgccccgcagtgccccattccctccatcagccgtttatctagcattgggtctggttttctgttttttgttgtttgtttgttttaattttttcagggtatcgtagacgtgttgggttccactaggccctgccagccattcacttatttattcattacgcactcaatgaagacataagctgtgcattctaggtgcaaaggacgtagaaatgagtataatacagttcctttcctcaaggaggtcaatccagtgggaaaacaggtgtgtttgtggaaaatggaaatacagccggcaggcgaggaggctgtagagagaggagcacagtgctctgagtagcctgtctgctgtagcaagtcacccccagcagctggtggcttcacagagtaaaggttagtttcttgttcacatcacagcccagcttggattggtggggtggcaagaagggttattcagggtctcagaatacttctgccgacaggctgtgccatcctctcaggccttggaacccgcccccttttaaacccctgagtctggctgacagataagggcccaagtcgcacccatgttttagggtctaggcctagaaagggtgccagtcatttcctgcaagtcccattggctgggactcagcctgtggccctgccttgtccagggatactgggaagtgtggtccagtgccgtgcccaggaggaagagcaggtgtggtgcacgtcagccatgtccccactccacggagcagcccgttcaccctggggcgtcaggagaggctctgtcagaggggattttgccagggagatgtggggtgtggggtgctggatgtggggtccaggagagcaggggcatgagaagagcagcaacccaagcaaggaagaggaaaaggcctggatgtgtcttcagatagagacagactgaagcgccggcccacactcaccagcagcgtggctctgggcttggtccttaggtgtcccaggtgtctgtctccgcacatcttcccaggccttctccagcgtaccggcatcacctggggactggccctctgcagtcacgctggctccaggctcaccgggagtcacgttctctggctgtgactttccttttgctgtggattaacccagacatgggcctgatgctttttctttaatgtatacacacacatacactcacacatacacacatggacacattcactcacatgcactcacatgtactcaagcatacacacatgcactcacacacatgcgctcaggcacacatgcactcacaggcacacatgtaaacaggcacacacacgcacatgtactcatacaggcacacacgtacacccaggcacatgcacacatggtctcatacaggcacacacgtacacacaggcacacacatgcactcacacacaggcacacctccacaggcacatacatgcacatgatctcacgtacacaggcacacgtatgcacacacacatacacaggcacacacatgcactcacacatgtactcgcatacacaggcgcacacgtacacacaggcacacacatgcacacatggtctcacacaggcacacacctacacatggacactcatacacgcacacatgtactcacaggcacacgtgtacacgcacgcacacatgtattcacacacatacgttcacacatatacacgcactcacacatacaggcacacacatacacactcaggcacagacacacacacacacatgcacgcacatgggcgcgcacacacacaccccctccctccctctcacggtttttggttcagcctgcactcaagtttttgggaagatggagctgacatcacagtaatgtgaatgttgaatatctgaaacttctgtgctgagaaatcccctcaggcctttttgccaggttggctgctgtgtcttcctatatttcttgccctttccacctctcccactttgctgctcccaaacaactcttaacacccaccgccccctgtttttgttatacagagcagttcagccctctccagtccccacccctgagctcagctccaagccttcttctgcgcgtggattcccgtgcctgcggactcacagcaggccgggccggctcacgtgggatggaccctgtctccttccacagggagaggggcagtaaagacgtccatttcccatgctttgaaggatgtcactgtctcagaaggcagaagctaattgtgtcggttttaagtactttttccttttatgtttaatttcattaaagttaattttcccttatgtgaaatgtgaatgctgccatcacaactggaaagttgtcgtgagaattaaagatgataatgtatgaaagtgtgtaacacggtacctggcactccccccactctccccctcctccacacggtacctggcactccccccactctccccctcctccacagagccctggaagacttggcggtgctgtgatacgtgtagtgtgtgatggggagcggtgagggacagctggagagggtgcgctgagccagagtttcatgctgtgtgtttttccgaggaggtgggcctttgtcctctgcattcagagtcagaagagagttcatcaggtacaaatgggaagagaaccttttaaacagctgtctgtttgagcagatttccccacctcggattcaagatgtcattccatgtaggtttgcatttgcagggtacacccaggagaagctgttagttgctgtgattccacacctggagtgaggggagaacatcatggtttcctgccaggtgtgctggggcttactggccctgccaggaacatctggttgaaacttgtcacgtcaaggccgggtgcagaggcccatgcctgaaattccagcactttgggaggctgaggcgggtggatcacttgaacccaggagtttgagatcagcctgggaaacatggcgaaaccctgtctctacaaaaagtacaaaaattagccagacctggtggcacatacctgtcatcccagctacttgggaggctgaggtgagaggatggcttgagcccaggaggcagaggtggcagtgagctgagattgcaccattgaactccagcctgggcaatcgagctagaccctgtctcaaaaaaaaacaaaaaacaaaaaacttgtaaaggttccatgcactccttccctgtagaggctggtgttgagagctcgccacctttccttctgtttagaggtaggaagagaactcaggcaagcgatgagcaagccgtctgaattgagcaagggccttgggttggaacccttctctcccctgctttcctggtatcacagtgctagactgggcctctgcagcccacccagccgaggaggcccttctcctacagcagccttgacaggtctgtctggcctctgccctgacacctccagggctggccatctatgtggggaagattatgattggaaggaaggtttttcttagagctgccagtctttattttctacctgctgctcttcattttgtcctcagaggaggaacgtgtcctctcttccctaggacgtctgtcttggtattgaagacagtgcttctgtgcttcttacttatcttccttgaggttagccatccttgtctctgcaccctctccctcagtcctggccactcccatgtgaacctcagtgtttattcctgacccaggatacctcagctccaactggaccccaggcagtaagaggcttcctcttagagtcagcggattcccactgatgcagcccaagattacctgccccgtcctcctcctcctgctcctcctctggctcctcccactctccctcctcctcctagtgcttctcctcctgttcctctcctcttcttcccctcctgctcccccctgtgttcctcctcctccttctactccttttgttcctcctccactgcctcctcctcctcctcctcctcctcctgctcctatccctcctcctcctacacctcctctgcctcctcccgttcctcctcctctgtgctcttcctccctctcctcctcctccctgctcttccccttccccttcctgctccccctcctcttcctgattgtcccctcttccccctcctctgagcagccatattacatagcttactcacgttgaccttgtgctgctggtgagctttgtttctccctttctgttcatgtactgttctttctcttggatattttctgccaaatgtttttcattgatgactttgctcttgggtctccttgcctatcttccttccttcccccttcctgctctgtgacattcttgtttacataccctctccactgtgagcctggtatttcagtgactggagaagttttgggccttatctgagctgctttccttgttatcacttatgttccagcagctcgatccatcttcccatgcaggaacgtttctccccaaagtcctgaccctgccgtggagcacctgaggggaggagtcactgggtttctggcctcagaggagcacagtgttccccaggacttaccctgcatccgtattggaatatctgaaaatttcatcactgttgaaaataggaatgttttctgatctaaggtcttctgaggacattggggacactttattcccaagagcaaacactgactaggatgtctttttggctatgatgggatctggtagaaagtttcaagctactaaaatagggaatgtattctaatgttgtcttgaaaatgaatcaaatacacttccctgaatgaaagaagagatgtgtgtgtgtgtgtatttaaatcaccgatagcagcagtgatgatggtgacagtcacccatgccgtgcctggcaccttgctaagtgcctgcacacattgtcagttggtccaggcggtaagtcatgaggagtgggttttagtgtcccaaagcctcagggaggttaaggcatgtcctgatcacagctggaggacctcaccacgcccctccctgtggaaggagggattcttccgcaggaaatggagttttcccacagaacacaggacaggcagggaggaactcactggggctcatggctgtgctactgctactaccactgggcaaatctctgggcctcagtttctcctgtagtaaagtggcaggattgaattggatgcacttaagtaggtttccagctctaaagatctatgatttgttgtttcccttatttcagtgacaagttcctttggaaaacattgctgtcacaagaaaaaatgccatcatcaaaatgtcttctgatgttggacaaactgaatgggggttaggaaaccacttctgtaggaagcaggggtagggatgaaggcaaggaggacagatggatgagcatcctaaacagaatagggaaataattttagaactgatttttcagggagtcgcaagattatattactctagctctcgctctgcacctggaattcgacagtgcttaggatagggaatgtcgaaaccgggaaggggcttcccctcagccccaaactcagaattcgtatgtcagatctggaaagggaccacagtgaccacttagtccactccttcattttatgtcagcatccctggagatcccagcctttgggagaaaaagactcctgaggccacgtggtccgagctcctggagcatcgctggcagaggagtgttcagatcagatggtccccagcctgtgcaccaagtgtaccatccctgctaagtagatcttagtggagcagggcttacttcagggatgtggagcttattgggatccttcagcctctcttccaataacttctgctttagagattatgatgtaactgatgagaactgtcttgagacttccttttgtacttaaagtggatggggcaggctggtttagggcagtgtacctggggcaaggagtctggggtccttctgttggtttaggaagctcctcttgtctgtctggcctggatacttgtgatttgccagcttagtctaacagttaaccacctcttagtgggaagtaatgaatccaggattctctgctacgctcaggtgataaattgtgataaagtcaagtcagaatttcccagcttaggtgttgtgaaagcccaaatgaggcctgataagatattttgagtttttcacacagaagtaatttatagatgattcccaacttttgaactgctcttttatttattattaagttggtgtttcaaacttagaaaactgcaaatggcatttagttttccaggctggcctgtttagtgcataacacagctgacacactatatggttgccataaatcataatggaaagtagtatttttgcaaatggataatgtagaattgcagttgcagactccctgaaggccttcagtggttccagccagcacatgaacacatttacactgaagcgtaaaagacggttgctttatgcatctttactctgctgtgagggccatgaggagcaagaggtcactgggtgtctgcaggcagtcccagggaagcagcgaccagagcagcagggtttagccttcttatggtcatgggtgtgtgcagccacacgacctcctgaaaaactgctcctgggctcttcagaactgccccagaccaagggtccagagttgttaggagccaggggggctggggaaagcgaagcctctagggcttctcagattttgaggaggacagaacctgttagccacctgccttttgctcagaaaaggtgggctggagctgcccagcaaagtaaatgcaatgcctacctccagagcctggctttccacgaggtacaggctggccctgaacacctgcctccttccaggtgctgtgctgtgcttttgagatcaggagtggaagctggcagaaccaagagaatgcaacacactggcctccaccttggcccagaacatacccaccacgccctcgggaagtttaaatcccatcactctctctgctgcttttccctgttacagtgtgtaaactgagattccacacttggaaatgcatgtgttcctctctgggaagacctccttgctgcccccatccccctgcatcttgtgtccactggatcctctcattgactgttgacaatgctcagtttaatgccaggcagcgtacattcagactgtaccccaggaaatctgacacaaactgtgtttcccattgattttaaaaattaagactcagtgatataatgtcacttattattatgtaataaagccctattatggctagtaatttttcagtgactagctgaattttacttattagtgttcatttaagtcagcctgtaatatgttcagtgcaagtactaaaactgcctttcttcaaaaatcagaaatttgacattttttaatcagtcaggacttccttcctttcccctcctccaaaaacatccagagaagtgagattttctcacatttaagtcaatgattgaatagaaccaaattgggggaagattaatttttgaaccagtaacaccaaactgaaattaattttactaatttcaaaatctgacagttttgaggaccctttaatagaaccagagcttctgaaaataagcacctactgatgggttcagtgcagaaatgaacccaggtctagaactgcagtgttaagagatgatttccaaacgaagctgtggtttcatttggaacgctttcttgatttacatgttctgggttttgtaagtttaattcaaatttattttctcctaaatgcatttttactaccggaaggcccccgtatggaaatcaccttctctcattatgcagcttgcctggcccagagggtgagcgggccttggaatgaggacacccgccctggctgggagtcgaggccgagtttgcatccaaagctgtagcacagtgcggcccacagcaaagggcatcctcaggaagcaaggtgcttgtgtttgtgccttcgtcctttaagacaatacccagatctggcagcatcttctgcagcaagcaggagctgattacctggagctctgcctgcctctctccccgcctctgcctccccccggagaggcggcttctgaggaggctgctgttggcggccaggagaattccttgtctctgtggaaccggaggcctcccctctgcggctatttaaatgtgttcctccggcatgaggatgactcaccgtttaacaattaattacagctccgcatattgtaggcactgcacctatatgggggtgtaatctccgtgcggcaccatgttgatgagctgcttctccacatcaccaaattgtgaggacttcgattttaaaaaacagaaattgaaccaggcttggaggaaaaggcaaatttatacaatgcctttgatatgaattctttttattttcttctctgtggcttgcagtttccaccagggtaaagcaggcagaggtgggaggtggggagggagagacagggggttctggctaggaagggaacgggcaaggaaactgcccactacgtgctgtcacctggtggctgctgtggccggccctcattcccaccacatcagagagaggcataataatcttaggtgattttttttaagttttcaaggtgaggatgcattttactatatgctaatttttcttaatcatatgttatggtttattatcgacagatcttttaagaacttttcctgcagtaaatatttcaaactttataaattaagtattggctgcataaagtcctgttgcctgagatttgttgcaagtttgtcctttttgagatacatcgagtggctccaagtcatttgatcatgatcgtgtccatgatatcttgatagacttttaagcgtgaatccccctgatctctgtcttgctgccttccccacaccatcccctcaactcccctcccagccacgaattatacttcctcactacccaatttcttttggtaccaggagagggccactcttgttctggcctcagggacgttgcacttgctacagctgactcttgaacagtacgggtttgaactgtgtgggtcacttacacgtggatttccttccatctctgccacccctgagatggcaagaccaacccctccccttcctcctcctcagtctactcaatgtgaagacgatgagggtgaaaacctttatgatggtccacttctacttaatgaatagtaaatatattttttctgccttaggattttcttaatatattcttttctctagcttactctactgtaagaatataacataaaatatatataacatatataatatgtgttcatcgactatcctgttggtgagccttctggtcaatagtaggctatgagtagttaagtctctggggagtaagaagttaccttggattttcaactgtaagggagtcagcgcccccagtccccacattgtttaggggcaaactgcattccatcttcttggactgctcttcccacaggtgttgcccccctcccttttcctctgtcaggtcccagagcatgggttaccaccacagagaggcctctgtggatgcctatgtaaagtggcaccatttacttcagccgagaggtgaaggctgccgtgaggcaggaccatatcactgcactcagtctgggcaacagagtgaggccctggctcaaaaataataccaataataaaaaaaagtgctaccatcctcccagctcctcactcccaggaatcactcaggagcccatggttctgtcttattttgttcatcgcacaattactatctgaaatgatctcatttatttacttattttttgtctgcctcccaccagaatgttctctgttctctgccgtatccttagcactgagcagtgcctgcacatggtgagcactcgacaaaaatttattataaggatgaatgaatggatggaccctcgattctgttattattatgttttaatccagacaacactcaggagtttcactgtatcagtatatccattaggaaggttagtaatgtgtaaaaactctcctgtgaatgctttcattcagtactcagtctgtaaggggtaaatccttcagcagactcttgaggagtgtttaccaagtgtcaggcactattctagagcagtggctctaacctagggatgattttgccttccaggggcagctgtcaatgtctaggaacatttttggttgtcagggtgggtggtaggttgctactggcatctagcggatagaggccagggaagccgctaaacatcctgccatgcacaggacagccccacaacaaagaatcatctggcacaaaatgtcaatagtgtcaatagtgtgaggttgagaaaccttgttctggagtctgaggatacggtggtgacagggcaaggctcctactcccatgaagcttatattctgttgcaggaaccgggatagatacacaataaacaaatgagattattctgggaatgacaagggctgacaaagaaagcaaatagaatgttgcgatggtagctgtgggagttacttagatcgacggattggggaaagctttctgagaggtggcatatgagctgggacccctccagatgagctggaggcaaccctggagatctggcagaccctaccaggaggagtcagacagcaagtgctaatggggaaggggaaaactttccaaaggttctgaggtttaggttggtttcaaagagggccattcactctggggcttgaatgtgcttttatccaatgaaggtagcctagacatctgtttgaaaaaccattagattagtattcttttttgcaatatctcgttttttggaaagagctaagcttcctaaaaaacgtatttttctagacttcagagttccttaagagtggtggtttatctttctgaggttggctgccatgttgattcctcctcccctttcccagaattgggagtcttacagctttgtctctccactcagtgctcagagaatcacacacacagtcccaggataggacattccaaaaaataaagaagggcacagagaaggtgggggaccttccccgcaacttagccgcagttggagattcaataattgagcctgaaagatcactttaatttcctcaataatagtttggtgttcttatgtgttaggttataaagccctaaaacgcagtataattcaataccattgtgctacaaacccactaacacttttttcttcactgcccagcctggctcctcctcttaggagtcgcatgtccatacagagtcccagagaaattctacatctttctctgtgttctcccagactgaacagaagactggaaatgtcttcccttaggtctttgctgccaatctgggaaatgtcaaaggaattagcttttctttctatacttctagcatgtatttatcctcgctataaatgtcactttttttactgcttgtgtgtcagtcaggttgcttttggctgcaagtgtcctcatgaccctaacaacaagttactgtgtcacatatcaagttctgggagagggaattccagggggaacaggaaagcgtgtcttccttgagtgaggaaccctctccaagaaccctccagcagactccgccatgcttcattggccaggggctggccagatatctctttagcagggaagatgggattggcttgggtgaattgtgatgtgcctccattgcttggggagaggtgacatccaaacaaaatctgggcactcccagcaagggagaaggagggagtgcttctgggtaggcaacgattccaactttatcatttgtcttcctggcaaggactcagaagatactgaccatttatatttttctggttcttcatcacatgcaagaatgtcttttgttataatgattagagaaatgataatgatcgtgggcctttgtttccccttgcctgagctgggccttcacaatgcacaggcattgcttttgataaattggattgacttagaggattttagacttggaaagccttaaagaacagccagttcagtctttgtctttccacacagggacactgagcccaggctgccatgtggcctgcccaggacctcaccgcttgttcagctgaggcccgcacgctttgggtgcacaggctcttactttgtgtctttttcctaatttcatgaagcctggtccccgtttgcctccagctaatcaatgctattgtacacgtttaggtctttatctcagttgaaacctgcaccagaactggagaactaagtagtagtcatatatagctcagcatgaatattagatatttcttattttaagtcttctcttgaatcatttaaagacatttcaatcacttattaacaggtatggaagttgttttgggggatgaggaccttcagtcctcttcttggtccttcagaaccacatcatctgggtggtgcctcttctgccccttcctcctcgaaggcagctctgccaccactaacagccacagaggagaagaggaaggggacttgcttcacgtgggaaggagtgtctcacctgaagcatccttggacgcttatttaatttaaaaatgtttcatgagcaacttctgagctctgttgtcctcttccccatgagcggagggtggaatgaggcttgaggataaaggaccctgggccttgagaatgcttcaagccccggagatgaagttgtctgtctgacagaggtccccaagtctgcatccaaggagaggacctctcttctctatgaagagatgctttgcttctggaaacccaagtacaatcctagaaacctaggagctggccatttgtacaccgaaagttttctttttttctgtgtgaatggaatccccatcaggatcctattaaagttctctggggaatttagaaaggtcttgatttccatgctgggggtgtagccatgcataccctgtctatagtgaaacgtacatagtattttccatgaagggaagtgcctgcaaactattcaaagtatcaggccacaggagcgaccagccaggactgagaaggtggtgtaggatgggatgtccgcctgcgatccatctccatgctgtcctgtcctcatgtccccataggaacagttatggacattggacttttccttcttacagtccccctcagttgtggtgctgttggcatttttgcagggactgttcgttgttaggggctgtctcacccactgaagggtagaccttggttaaggttaaggatccttgaaggtttaggatccttggcttttacctgcattcaattacccacccaggtattgcagcaaccagaagtcccgcaccagcttctcgccatctcccgtggagcagactgctctgggcctctgttacaggacggattaggagtcaggattctggaggtggctgcagtcctatggccaagccggtacctgtacctccagggatccgcattcttaggagggttttctgaatgtagggaaagagagcaccaggggacactgctccttcagggtcacccaccagcccctcatggcttcactcagccaagaagcacattgtatctccttggggccctctggcatctcctctgccttcatacttggtcctgggttgcatgcatttgggatatgttttcacaccagagagcttgctagacagagcccaaggggatggaactgagtgaagtgacctataggcctacttctggccaaatctcagggcccaggtccccggcacaggtctttgctgcgtgtgatttctgccccttcatgggggaccaggaggctctgcagtcttttggacattaaatgatgcttgcaaaacaacaatgtgatgagttaggaatgaatcagaagcagacgagggacatttaaaacctcttagattacagtcccaccaacagtgtaaaagtgttcctatttctccacatcctctccagcacctgttgtttcctgactttttaatgatcgccattctaactggtgtgagatggtatctcattgtggttttgatttgcatttctctgatggccagtgatgatgagcattttttcatgtgtttcttggctgcataaatgtcttcttttgagaagtgtctgttcatgtccttcgcccactttttgatggggttgtttgtttttttcttgtaaatttgtttgagttcattgtagattctggatattagccctagttcaaccattgtggaagtcagtgtggcgattcctcagggatctagacctagaaataccatttgacccagccatcccattactggatatatacccaaatgactataaatcatgttgctataaagacacatgcacacgtatgtttattgcagcattattcacaatagcaaagacttggaaccaacccaaatgtccaacaatgatagactggattaagaaaatgtggcacatatacatcatggaatactatgcagccataaaaaatgatgagttcgtgtcctttgtagggacatggatgaaattggaaatcatcattctcagtaaactatcacaagaacaaaaaactaaacactgcatattctcactcataggtgggaattgaacagtgagatcacatggacacaggaaggggaatatcacactctggggactgtggtggggttgggggaggggggagggatagcattgggagatatacctaatgctagatgatgagttagtgggtgcagcgcaccagcatggcacatgtatacatatgtaactaacctgcacaatgtgcacatgtaccctaaaactttaataaaaaaaaataaattaattaaaaaaaacaaaaacaaaaaaaaaacctcttagatactcattccctcatgctcacgttcctccccaaagaacctcctcccttcccagggagagggtcttggccacatgtgtgggaggctctgcaaagccagtgagctcttccacccacagcagtcccagggccctgacattcctccttccctttcctggttgccagactttctagaaggaagccatgtattcgggcacttctgaagggctgggtgaaactaggcaacagacttctgcacgttacactgggaaagccagtgtgtggaggtgcagcgtgacctgaaccagtcctgagaggccaggtgtccacacttggctgtggggcttggctggtgggggcagggcatgtagcctgggtacagggaggagggggactgcccagaggcactcactcttaatttggctttctcttcgggtctcattatgtgtcacttaatgtgaaaagtctgctttagactcctattctaaatcaccttaacctttcatcttgccctgtggtgctcttggctcctatagcactgaaaacaatgtgtaattctatatttatttatatgtttattatctgtcacccccagtagatggtaaactgcatgagttggggtcctgtgcattgcaagtgctggcatcttagtagctgcagaatgaataaacagtggcagtagcatcctctccggctgagtttttagagtaggaagtaggcagaaggtttggggtcatcttagtttgctcaggctcctataacaaaataccgcagtggggggactacaaagacggaaatgtatttctcacagacctggaggctgggcagccccaggatcaaggtgccagcagatttggtgtctggtgagggccttcttcctggctcgtggacatttgtctcctcactgtgtcctcatatagtggaaggggcgagggagctctctggagtctctaagagtgttaatctcattcgtgagtgctctgccccatgacctaattgcctacgaaagcccctcccccaatatcatcacactgggggctaggatttcagcataggaatttggggggacacattcagtctgtcaccatgtacatggactgtgcagtgggaattaccctgatttgaggagtgtttagggagggggagggcgagctggacagacctgggatggctccgcgtaaaccgtgtctgcagcatcctgggagcctgcttgagatccggcccttctaaggagctccaggagacttacaacccagcccttggaaggagatccagagggaagaaggccagttgatgacttatgaaatgtggatttgtattttcagaagtgcagagtagtattttaaaaaagcagatgagactctgagggttgggagaatggcagagcatgggaagtggaggctgcttcggatccgagaggaggcactgtgagatgtggaaagagcttgggctttggaatggaacctgcatttgattctagatttcaccgctgagtagttatgtagcttttggccaagtcacttatccagtctgagactcagcatttttatctgcaaaatggggctagtaacactgccctctttgagttgtcatgaatattcaatgagatgatgtgtgtacccacctccctacctactcactgtccaatgagtgtttgttctttgttccttttctctcttgaatagccagcgtggccagttttaaatttctcttgctctccaatctagtctaatttattctgtcagctgtcacatctactaactaggtagtccataggtgcatattatatgcatgtaatggacccattgttgtgtgaagggtggtgaagatttaggagcacagatttatcctgcagaccatctcccacatgaatgtgttcctgggagaatacattttggatttttaatacccatgcttcgtattttatacacatattttaataaaatgattttaagctgctgtttatataggaaattatatttacagcctccaaatgcaatataacattttagtgaaaagtcttgagttacatttcaagtacagttgatagaatgtgggaatctcttgtgggtgttgtgtagagcccgtcgagtgtcaataaaggggacttgctttggggatgtgtctgggccccaggaccacattcgaggagcatctttcccttcccaaggcaaggcatcttggctacatgtgttggaggatttgcagagccaggatttgggggatagaccaggctgctttcccgacccatgacacacctggactcttcccttccctttttctggctgacagtcttcctagaaagaggtcatttgtttggcccctccatggggctgtgtgaagtcagctgacgggcttctgcacattaagcggagaggtcaggagcacgttatattcattgtgatagtttgtgtgatagttctactatataatagacattatgctgtattttgttacttttaggaaatacatgatgaagtgttttggttacattttaggaaattggctttgagttgacatgtaatgcattataatttttcttatttaaaagatgagaaataggccaggtgcggtggctcaagcctgtaatcccagtattttgggaggctgaggtgggaggctcacttgagctcaggagttggagaccagcctgggcaacatagcaacacctcgtctctacaaaaaaaagtaaaaaaaattagtcaggtgtggtggtgtgcacctgtagtctcatttattctggaggctgacacaggatgattacttgggcccaggaagttgaggctgcagtgagctgagagttgagatcgtgccactgtattccagcttgggtgacagagccagaccctgtctcaaaaacaaaacaaacaaaaaaaaccatgagaaattggctagcgtttcccacagaacatctgactttcgggaaagtcttattgatgtgtgccttttttacaaatggtccctatcttcaaggcgtggatagtgtttttagggagacagaacaaacaataagaatggagcattcatataaggaacataacaaatagcacaaggaggtacgcagccaaattagtggacctttgaggacggcagggctggagaggatgggtagcaaccacatacgccatggctcttggaatttcagactttagcagtttctcaatgaatgttccttaagtacctgtcatgcacaggtgctgtgccaagtataaagtgataagcaaggaagcggaaaacgtagcatgatgcccagcctgaacttctctatgtctaagaggaatgagaagacattaaaaacacacagcacaacatgattcaaggtagaaaagttacaatgtgctaaaagagaagaacagctagacaacgcactgctcagagaggggagatgacgtgcacatctgagaggttgctgtggctttggctaggacagttatcttagctgagatggccttaaggcaaggtcttgatgagggctgcccatgttattaacacctggcactgcagtgcccgttagagtggatgccgccggctgagggagctggcaggctctggagccctctgtcccctaggcataaatctgctatgcagtgcattggagggaagctccagggacctaaggaaggatgtctgggtggtgggtggcatttgagggactcagggcactgatatttaccaacccatacagtgttttactgtttaatgaccagtatgttttaccatgcacagtagctgaagatcagcccaaattggaccccaggggtaggtaagctaatgaagccagaggtgtaggctatccatcctcttttgtcccaatccaggaaatgtattttacccaataacaacagtcctgtgttcttggagggtgttccacctggcgtaacctaagggtctaacttagggtttaagtaccctacattgaaataatagagaaacctgtgacctgaccactctaatgattctaatcaaagtgctccagcactgtgatccctgccccagacccctgggcctcacccccatccagtaaatagagggtttgtgcatggcaaagctgagggccgcagagccccgcgccagctctcccggccagcagcgtccatgctgatggtggtgtttgtgcagcacctggtatgaaatcttgtagctatcacccccctggttcccatgcctgccacttctatcagtaagacgcagcgagtcacacagtaccacagtgaagtcttggttttggatgaggtatgtgattataagaatttgtttttataaaaacaataatcatcctaaaaacctgtgtaagcctcccctctgcaaaccagtatggtctgaaagaaaaccaagtaaaacaaacaccaacaatccttatgaacaaaggagtgggaaggggtatgttcgacggttgtaatagtaagaaactcacggggaggagtcatagtgtgcttgaagtttggtggctctctgaagacaaatggcgctccatctgtgtgaaagggagcgagggagtgggggaggcacgcccgtggctgctctgtagctggggtgctgtttcataaggtggttcactgactggtaccaccgtcacacagcgccctattaccagttgtttacccaagaataaagaatccgaattatattttagaaatacaatttagggagctgaagtttaaaataactatcttgagcttcagaaagctcatctctggaaaatattcacagagggatatttgtacttccaagggaatctgatggggcaagaagcaagtcagatttctctacttttcagttaatggactccttaaagattatgttcgtattcctttaaaatagtaattgctttgtttcctcaagagccaagatccatccagtccctaaatcaaattctcaactaaaatcagaaggtttaagatacagttattttaagtgctgcatactcttaaaaatgtgtgtctggttatgttgtgtatataagtggctcatatcagagatgcagcaagtcaagctatataaaattcagtaacacatgccagagaaggaaggagggaagagagagagattgaaagagagaaagagatgcttatccttttctccaggagaggctcgaattttactttcaacttgtttctaaaaatggcagatgcaaagtaagaaaacaaatgtatctgttgcaggaaggaaggaaggacagagaggggaatctgatcttcagcctgatgtgatatgtttttatctgaatgcttttgcaatagaacatctgggaggcaagtgagaattggggtatgcctatgtttcaacagtttcattagggtcacagacctttatttcccagggctgtgatagaaaatatgaactcttccatagttgggagttgaggaaggggtaggctgaaacagtggcatctgtaacagtgcatgccatcagtgggatgtgatgatagtgcttatcacaatagctttaagacttatgccctctttctttggaagcatttaaatagctagccttgtttctctttcctaggaggaagcctgggattgatgttggtacctccaacctgaagtctgggaaattggtggggggtttgttgactcaagtttataagtggatttttaacccagttcacgtggtgcttgtgctgacactgacattttgtgctgcatgatctggaagttgaggcaaacattatcaatgttagactggcagaatctgagaggacagggtcccagtttcaaagtttagaaacatttcattgatcaaagtgtattagagaaaaaagcattaagttaattttttcattcagtcattcagtcatgcaacatacctttcttgatcatctgccaggaccccagcacatttctggaggctgtatttgggggcagattgaagctaggtgcagtatcatctcctctctggtaactcctttccaattgaatctgcagctataactggtattttgtgccacagagaaggaagaaagtatacaggtgggcaagctgggattatgtgtatcaagatggttatagtaatggaggaactatctcttgggatgcattttagcagaaaggaacataaagcattcaaaagagttctattctctagttagtgtcaggactgacttttctttgttctgtggtcaaggaaggccctactgaaaacccaggaatcaaggtgggtgtttgcatgaaggtcccttcagcgtcagcaatgagagcagtaaatcaggcagagctccctgaattaggagtcctcccaggcagtcaggtcaaggtcagatttaatttgggattttgtagtttacaggatgctacccactttcttacacctcacagtaaccatgttccagcagcttattggattggtccaggctgtgcctggtggtgagaacgtcaggttttgtgggcacatggcttcaccaggagaggtctggggtgtctcatgttggtagagaaggagtatgtccgtggactctaacttctctagaggcaatgccaaaggcaaactggatagctgttgctgctgtagttttgtaaatctatgaccctctgttgaggcctctttaactctagcagccttatgcatctttatgattaattcagtaggaccccaccagcagactctccttcttctaagagtgtaaagtcattcatgcaggtttggccttgcttggaggttagggcttggggggacatgagcagggcttgccctcaaattcccagtcatttggctcctcctttctttcacctgttactctttctgctgctttttttttttttttttttttgagacagagtcttgctcttttctcccaggctagagtgcaatggcatggtctcggctcactgcaacctccgccttccaggttcaagcgattctcctgcctcagcctcccgagtagctgggactccaggcgcccaccaccactcccggctaatttttttgtatttttagtagagatggggtttcaccatgttggccaggctggtcttgaactcctgacctcaggtgatccacccgcctcagcctcccaacgtgctgggattataggcatgagccaccgcgcccggcctctttctgctacctttacgttatttacacaagcttggaggcctagaggcaggagctggtatttggatcaatggctgggtaatccagagcagttaaagaaccaagaaattattaatattttgttccaggttatatgtttttatggggtgatggtgaaacaaagaatgaattttgtttcctaaatgtgtgtttcttgcactgatagcaaaattagccactgtttacatttcctgagcactcatcagcctgtggtagagagaactcaaaggtaagtgtggttgcaaggaaagaaaccgggaatccagtggttgccgctagcttcattcaatgtatagatccagattattacatattatctgaattaaacaattttactttagagagatcatgcaggttctgtgtttgaggaaatcttacggttgcttataaaggaaatcattgccccaaaattctggatttcaactaatctgatctgcttaaagcatgacacctgcatacttgctaacttattttttgagaatagagagttagatcaggaataggattcagtccttagaatgcagagcttataattttagaaaggtatgtattttatttaggccaggtatttttactgttaatatatttactgttttatctagaatgttgactctgttatgattgagtcagttgccccttccccacttcctctttcctctgtgtatttattgcacactgactaagtgtctggtgtgacagcaggtgctgcggtcatgagggtgactagttagacatggtttctgccttcatggagcttacagtctggtgggagggatggacaaaggaagcacagaactggacaccatgcattttctcctctgacatcagagccaaactggaagatcctgaaaataattctattgcatgtcccttggagatattaacacattgctcagtgatgttgattgttaaaatatcctcttgtttggaattgttatcacagtggctcctctggcggtagcatgcttataaaagcaaccaggaactgcccatgtgcccagtctaggctcctgactcccacagatgcctctggggctggggcccggctaaatattttccaggagaaaagtcagtcaggagccagcgcctgccatttcccattctttcagagccaaggagctggacgggcatctgacagcctggaagggccctgctccaatctggaactgaggttaacgcttcaggtcagctacttcctaagggaaggaaaaatccctcccagggatttttttactttgagctttctctggtgctgcttgttgctggccttcagattttggccaccactatcttcgggtactattttctctgcctcccttggagaggtgaccttccccttctgtgcagggccctgtctgtcccatgtggtcttccagggctggggtgaggaggaggcggcgagattattgcctgttacacatggacatctagacgggggaagaaacataacagctttatttttaggctttgctaattctcactcttctcctagttcgctgctacctggcaacagcttattgtcatggcaacaccgatgttaatgagtgaaactctcagtgtgtctgctctcctggtgctctgacagacaccgtgtggagctatctttctggccatcagaggctaaacgctaggcttccttcccctctgcaggcctcccaggccccgggccccgtccacagagggaaggcacggaggcagcgttgacaagggatttatggctctgcttacacattcccagcttctcctctcttcacggatgggctgctgctctcgcactgcccctcctcccgcagtccatccgtccacatttttaagcggtagctgtagcccattttctcatgtctagggcacctcaagatttgagccggtttttacagcaccttctctgcagttgatcagcagggctgaatcgcgagtttgggagaggagatttgtggctggaactggcgctcacattggggagggaagacctgcaccttcagctcttaggctgagagtcagtaacaccaccatagcttcttgtcttgcttctctgacatctgtccctcaagggtgcctttgcagcattacaataattgtgaggaagagcaggcagagtctgctccagcctccttgtgcctcagtttgtccatctctaaagcagcgcatatctgaaattggatggtccttaagttggcgctgctgaggaggggttcatgtgaagtgctctgggctcctgctcaccatttctatgatgtgggtaacttgctcgacccctctgtgactccacttctcacttgtaaataaggatagtaatagtacctacctcagagtgtcattgcaggactccaaccagatacatatgtgtccggggcttataataaaatcatggttcaataaatcttagttcttactacgtgtggtcattattcagtcttcacactgatctcgtgaactaggactattattcttgaattacaaagaaggaaactgaagcatggagaggttgagcaactgccaaggtcgctggaagcaacatgaagcctaggcgtgccctgagtcaccacactgcacattgcaaggtgagcctgaaggggatggccctgtatgccctcagtgacttctccctgctccggggaggtgggcccgggaccccaggagtgtgcctgaggaccttgcactccttggataagaggtgtcaccgccagcccccttcctgtcttccctgtaggcccagcactcattcacaggcagacacttctagttagcgcacatggttgatggacatgtgaggttcctttgaccccatcccttctagtctatgcttctgcttctttatctagaaaatgtgcagccatgtctcatccccgccaaaagaggtactcaagaagagagaagaggagtgttcagtgtcttctccccacgtcccctttcccccagcgaggcacaggggctctctctgggtttggactggagcacctcatgggtgtgaagtcgggaggagccggaggcagtgaggacctgcattgcagcgggtgtgtcggagggctcagcaaacgtgtgctgcatgagatggggaaacgaagccatgtttgccggcatatctggggttccctggtcactgagacatcagagacatgtcaatctgagtccctttgcttggatttaatctgctatttgtgggtgttctgttgcattcagtggggcttcagtcttcattttccttgtcctttgcacttcctcatcattccctttctgcgagcttgcccacttgctaggatggatcctggtcagtggatcaggtggtggtgctgagggctctgttaccctgatggcttgccagcttgcagggcccagcatgcctgtgagggcaaaagggttctgagtggggcctgttcctctgggtgggatgcgctctccctcctcctaggcttggttcctctccttcctcggggcctgattcctccagctcatgctctgtctttcctcagagctcctaccacagtccctgtcccccacactgttaacacttttacatcagcattgcacatggacataaaggggcactgcagccagtcccctgtggaggatcaggatgtcccagcccttcagggacaggctccagggtaggcctggcagagggaaggaccatgttctctcccaaacaggccagtccttggagctgctgccatggcttcagcttccagtaccctgtttggagggctctttgcaaagaggcagaagagccccaaggtgagttgaagggccctggagccccaggcctgcctgcctggggagcagctgatggcgaatctgtgtcctagaacacgccctgctgccaccagtgtgacatcagccgtggttgtgaaatttctgacaaagatgctgggaactcatcctgttctcgaagtcaccatgccgcccatcagttgacatgctctgttgtcaagaacacaagaaccagagagaaagcacactcagcagagatgtgtcctagggtgttagaggaaggaaccccatcacaaaagaaaattagcaaagacagaactgggcaaaaccaccagaggtccctggggcacgccaattaactagctgggagtcttgggcaagagcgaggggaggccagggcttagggatgaaatgtgaggatggggaggggcctcttgagctggctcagtgcctcagtcgggcactggatatggactgggaccacatcttctggcccctcttattgtccctactgccttgaaaggactagattataattacctgaaggactgagtaggcctagaaatacttccctaactgcttactcatatcaacattccttccaagaaagaagcaggcacgcagtccacaattagagataaaaggcttcaactggaggaggtaaggccgtggagcgaatgtttcagttggaatgcaatcagtcaaacaactagggcaattgactggttatcaaaccctcctgggttttgatgggaggaaagaagaggaattactcataaggcagagttttcttaaataaagagaagggccccccagaagaagaggcttcaggacactgattcttactcttgtctgtacagtagaataatctgggcagccttttaaaaatactcaattcctctgcctcaactcagaggagttctgattcagtggccttcatagggctgggacatcagtattttttgaaagcacccccaggtgattctaataggcagccagggttgagaaccactggtttagaggtgtttaaagacagaaggcaaaatgtgtagactccagcacagaatttgctgttttccaggctgagaccaatagaaagcatatcctgattttaattcacagcggcacattctaaaagtatactccaggatttaaaaagtctaggggcttttggaaatatttgtttgcccatgttcatatcaacattatttgtaatggccaaaaagcagatgcaatccaagtattcattcgtggataaatggataaacaggatgtggtatatacatacagtggaatatcattcggccttaaaaaggaaggagatcctgatacatgctacaacatggatgaaccttgagaacattatgctaaataaaataagccagacacaaaaggagaaatatggtatgattccacttatgtgaggtacccagaatagacaaatttatagagacagaagtagaatggtggttgccaggggctggtgcagggggaagtgcggagctgttgtttaatgggttcaggatttcagattttcaggaatagcaaagtgttctggagatggatggaggtgatggttaaacaacaatgtaaatgtttttaatgctactaaattgtacacttaaaaatggttaagattgtaaaatttatgttacatgtatatattttaccacaacctaaaaaattaatttcagattaataagaatcatctattttaatatttgagaaaaacagaaatgtataaaggagaaaatttcaaaattaccacttgatatctagatgtattctttctctgcatgtgcttaatcatgcaaatacatacacacattgaatcttactttctatgatggcttgcagtctgggttttcatttgtacttgatttggtttaatccttatttcttgacagagatggttccatctcaagggtggagtaagtgaggtgacatagtaggtgggcatcctaacatatccgtatattcagctttggaatcagacactactgggttcaaatttgcacctgtcatgttcacgatcggtgtgaccttgggcctcattctgagcctaagtgtccttatttcagacttgtttgggaagttaaagataacttaggtgccaggtccctgctcaggccgtcgggaaatgggagctgtaactgcagagtcaccggagacttccacggacacttttacgtacttgagatagatattcagtctccacttctacccgtctaacttaggagagagcttcggagaagccctgatctgagattcaggaagtcgccagggctgccacatggtgctgtgaccttggcaacaccagattctttctcggtctctgttactacatttacaaagtgaacacattgggttttggggtctctgggctcctcccacgtccctactctagcatcctttgcctctccgtagcctctcactccctgagatgcagggccctcagtggatgtccagtaaatgtttattgacaacgcgtctcctgcaggttaatcatcaacaacatgcaacaatatcccagatatgaccggctccctccaaagagagaaacctgctttatggcaaactcattgacttttcttcaggaagaaaatttctgctggtgcagcaccatattctgcaggagtttggatagggtgtgctggaaagacagggatatttttccctaaaggcagtgcataggggcagaggggcaaaactcccttttttattcctgtagtgcttgtactggggcagaggaagcagatgcattaccaagagcgtggaaagaagtcctacgtccagcctagagctcagcgcatctttcagctgccaaatggaaggtctctctgtggcaatgctggggagggaaattgagttaggatggcttgttccaaataaaatgctatatttaatttcactctgggaaacatttgatgtccgggctactgtaatacgtgaaatagatttaagaagatcctttttttgttagaacaacagaaaatacaaaacagggaggttctcagatcagttgcaggttgcacgtaggggtctgatcatttcagtgtggtttttaagcatctggcagctgctggccaacggttgactagtcagtatctagcagcctgagtgtcactgtatgcgttgaatctgtctcagtagttcagcctctgaaatgcctttcaagttaagccaaggcattcggcacaggaatgggaaactgtcagtttgtaaatctgggatgtgtatttgtgtgcttgacatgtggaagggaagggttgagtatgaaccaatgctgagttagatcaacaaatatgtatctgactatatgatctaaaaatcagccaggtagagttccatctccagaactgctgtcccttttatgatggtcataagcgccatggctgctggacgcttctctccctttgtggagctctgccctggtgcatttctgggctaactggccatgcagggatttggggaaggagctcacagacctactttacttttcacattgttcctatcccttcaggcttctgcctgtttccttcttgactcctgttactttttagtgtgaggtcagaaaaagctcttctcccctcttctgccttcattcatttaccattcagaggacctcactgaagtggagagaccaacagatagggctgccaactcaaccctggaaatgctcttttcttattttacctggccatctagaaaccaagtgttttatttttttgtccatttatttaaaaaaactacagaatgaagtatttttggggactgtgccactctttcgggctgtaagtagaaaagaacaaatatatccttgtccagcttttcctgttagaccctcagaggaagaagctccagcccgtaacctgtgaggctttattccttggtgatgatgtgaattagagagaaaagctaatctttttgaatgactatgaaagtttctctgtggagcatctgaaaccctggaaacacttgctttcacgaacactgagtgcacccttatatgtggaaagaatttcagaggccaggtatcaggagaggccctgggagagtaaggaaatacaagcagccttttggcctgggatctggaggcctggagtctggaggcctggtgacctaggcagtggagggcccaggagggaggctttccttgaagagcactctatgatgttggttcagctctctgacattgaatttgtcatgagaacccaagctgctttccatgatagaaaggatttcctcctcctcagatgctgagggaaatggttctttgcatcctgcatccagaatcagcacaagacggtggaagtggtcagggaccagcatctgggctcccctgttctccaactggcagtgctgtggggtccctgggcaattgtacagaaagcatgtatatagagtcagatagatatgtgctggaatactgacacaattcaaagctccctctgctcaactcctttgagctgagcttaatccatagctctctgaacctcagtttcattatctgtaagagtgggaatgatgatactgcagagttgtgaggcctgtgcatgctaacgcatgtgatacaccagctacagtgctggctccctggtaaggctcaggcatggggaactggtacaagcattacctctgccctcccatgagacagggggtgctgatatttggtgtgaagaggtgctgacactagatgtgaaggggtgctgatactaggtgtgaaggggtgctgatactaggtgtgaaggggtgctgatactaggttgggttctcctagatcagtctgatgtaggagagccatcttcagctggagctttgggatctgtagttactgaccagtcttgactcaccattgtttgtggtgtctcttgtcttttttcacttgtttccggaaggcagctggtggtaagttttacattagttttagcttgagtattatgcttggttagcgcaatactaaaattatttcctttttcctgtgcattcatctattcaacatgtatttatcgaggatgaactatatgcgaggcactttgacaggcactgatgatgctgtgcttggcgctgagcgagagtttacattctctgtgcatatgagggcaagaagagaagagagagaaaatttaagatgtaagcaaataaatgagagagcttcatattatggtaggtgctatgaaaaagaaatcaaagagaaacaagcagagttttgtggtaacatgactgtgggtgggggttactttaagctgttggtcagggaggtcccctctgggacctggaagacaagaaggagctaggcttgcaaagaaagagaggaagagccttccgggggatggcatagcaagtacaaaggcccagaggcaggacaaccttggcatgtgtcagaaacagaagagcaaggctggcacacagtgaatgaccaggcgggtgcaggtgaactggtcaaagggttggcggtgtggggagagggagtgctagatcatgactggtagggagggtgacgtgtcttttttatttttagaataccatcattctgcctgtggattagaaaagggagttgggagggaatgagaaactggttgggaggccagttgggtaggagaatagaggctgggaccaggtgccagcagtggaggtgagatgaatggacagaatttggccagtgggatgaatgcaagtgcctgggaggcagagttgccagggcctgctgggcagttgggcaaggaggcctcaaaggatgccaggcagtttgttcagaataaacatcaacagtgaaagtcttgtcaagagtgttgggaagttggacatttttagatacagctgatggcagtgcagaagttccactcaccttggagggtcatttgacaaaatgttcaaaggcttcaaaatgctcatttcttttggttcagcaagtccataggattttatcctacagaaacagtcagaaatacacaaggattacttacaagtgtgttcattgtagtcttatttgtaatggagctaaacctgggataatttctctcctctattaatcaccagagggctgggtaactaagttaggatgcgtccatatgatggaacaccatgtagccattcaaatgataacctagaaggacagttaatggcacataaagatgttcaactgcactgctaaatgaacaaacatagaaagttatctacaatatgatcccaaattttataagatatataacctctatttacatctcatatgagtgtagacaggatatactataccctggaaggtataataggtatacattagagtgttaatgataagccaattcagggaacaaaattacaaattattttatttcattctctatttatgattcttctaaattttctaacataaacatttgaaataaaaacttaaaaaaagccctgttatttgaaaaaacttgtgatgtcttaccatgtccaagtataaactgaaaagtgaataaatcagtgggctggtggcccttcttaatacactgccatacataggacaaccatttgtattcagaaagtttgtgttgagtaagtcactggatttgagtcagaagacttggagttggagtcccagctcagccattcactggctttgtgatcttgaacacgacgcttaacctctaatgcacagactcttggctgcttcaatttgcagtgggaatgaatggtgataacaagaacaagaataatgctttcacggagttgtgaggattcagtgatagggaattagaaaatattttgtaagaggaaaaccacaatgtaaatattaatatttcagggcccaagtctttgacatggacgtgactatgggcaccaatagatttttggatggatcatttatggtaccctgtcgtgccctttagtacacctttgcctggtgtacatctcatgcaaccaaatggccagctcacgtctgatcccaagccctgaattaagtgagcaatctgaacatgagggacaatgagttgtcctgagtggcaggcggctctcaagtgaggagtgctttctcattcactggaaaactgtaagtgaaatgctgcttcagcagccacacccagagcccctttgatacatggttcagctgttctgttacataaacctattggaaatgaacctgcaaaggagttgagcagagggaggtgcccattggaataaggacaaaggagaaatgcactacctctccatttaaaggagacatttgctttttaatggaccctaaacactgggatctgaaatgtcacaatctttacatactggaatggacacgcacataaatgctgatgaacagctcagcaggcacttaatttttaaatccttgattgttcaaggacagggatatcctacttggctctgcaagactcatagcatactggacaatgttgtctgcatcggaatgtcttactggggagtcacacctccaaaaagaagctgtgtggtgaatgggtccaaacataagggtttgagcccctgttttcagctgggatttttgggtaaagggagatgaagcagccaggtctaaccaactgcagaggtttatttcttggggactcccagctccattgaggtgtagaaaatatagcacataccagttaccaacaaggatacctgttcctggatggaactgcctggttggaaagaatgctggtggtcagtagtgccttctgatcctaagaagaggaccctaacctggccattttgaataagggccccatagctgctgattaagtgtgtcaatagtgggttccttgtgatgtaacattcatcgtccttcctgtggtggatgaccctacagacccacctgctgataagctaagctgcttgcttaaggccataaagctacagaggtattaatctagagtttgaatcggatctctctgactctaagactcctgctctgaagtcctccattatccttcctcttatagagttgttttgccagtgctattggatttgaattcaattgtaccctacgtacattagaatgaaaatgttatacatcgtagaaaatgaataaatcatggttccatccctcaagaaacttatatgtattattatttaagagtttgaagtgcatagcaagagctcaataaataattattgagtaaatgataatacacaaatatattctagtttatttatagatatccataaccccaatcagattatgatgcatctcataaaaggtgcacacacaaaatcccatcggagtttaaagacgggagagaatacctctggagaaatcaggaaaataaaagttggatgtatcatttgagatgggtcttaaagacctgtaaacactctgacaggtagagatggtgaggcttggttcccaccctgaacctcctgcctgctgattggttcctgcagtagaccctaggtgccctggtttgtttctgctttgtaattccacttcttaatgatatcaacaactgggagctgggaaatgaagtttttattctgataaacctgacttgccacaagaggcctacaagagaaagtatgatttctggtctcctctccaccgtctccgatatgcaaacgagtcacacatctgtatcttcattctagagctctcttttgaactgctaatccccctggcggagcctctgatcctggttatccagcattcttctagatttaaggttgaaacatgatttaaggtcatgaatgcatgaccttcccagactcccttgtacatgagctcccacattcccagcccctgttctgctccaccccttgtggtgatagccagggtggtcagctgcattgcatgttagtagtaagggaagaatggggtggtgggtccagagttgtgtgttataagatgactttggaggtcaggctgttgttttggctcactttgggattttggggagtagcttactttgccatcaatttcctgatgaagaaaaggcaacttagcattcttcgtataagtaaacaggtcagtgttggagataattacatcatgaagcaccgtgggtcccagaggtgggaggcctcatgtaagtactactgtgctattgccatcattgtctggaggggatgataatgtcgtatttgcttgcaaaatggttttctgatgttgggttgaaagagacggttatgtaccttagccaactgttagggctgtttttcttctagcacaatttataaagtgatttttgtcacacccaaatttttgcaggaccgcagaactcagacatttaaggttgtggcttttcagaatggatgaataaacgttcgcactctaaacttaagagtgtgaaggcttgtcaaggctccatttctggtttgctttctgatctcatgcaagtcacttcacctctctgctttttgtttttccatctgtgagacattgctcactttgccaggatatcttcaatatgaagaagataatgtgtggaacgctgtcagctgctgcatcattaaaaagcatttattcagcacttatgtagcattgcacaaagagaattataaagactagatccctgccttgtctgctaggttatattctaatatcttcttaaaaaggcagaaactaggcaactaaagagagcaataattcaaatgttatcttttaagctacacaaataacagtagcataaataattaacaagcaccaatacgcaaagaaatcagttatcaagaatacacagaaatagttatcaaaaatacatagataaaattatcagaaatttctcaactttctggagccaagtcatgcaagaacctggttttatgtaaatgaaattgcgatactgccccctggaacctgagcaagaagaagatcctagtgggcggagtggggagggaaagtgttctggagagttttacttgggattctggtatttgggtttctgtcactgtctcttctccctccaaagtcaactaatactcagacattaaggcttaagaccctgttaaggggaaaggtctatgctttagagaggatgctgtagagtggtaggcaaccatcattcctcttgtgaatattgtggtcattgcattatgggccttcattgaattatgaaccatcatgaggatgagatccaaaccaagctggatggaaaccacatggatgaggccccagagagtgaggacgccatacaaatgtaatcactgagctgtctgaatcatcttgagaaaattctacaagtctgtatacatctgacttccccatcagttacacactttgaaaggaaagctctagggagaagagtaccatttgcttccccaatgctaggagaggaaggtgatgagaccgagattactaactaaattatttcctgtgacttcttagaaaagctgaactcccaaggtatgccgcttggatatggggacgcgcacacacacacacacacacacacacacacacacacacacacacacacagttttcttcatacaggggtagtaaaacctgtcaggaaattaattaaattagctattatttgtgtttctcttatagtttacagcatcctttcactgatttgatctcatttgacataaaaagactagctgtcaaggtaggtgagactaagattaatcatccccattgtacataaaaggaaaccaagactcagaggttaaataacttggccaaggtcacacaaccagtgtgaatctggcagagaccagatttagatattcactgtaataccctgactttctctctggaagatggtcagcagtctaaagccaatgtatttaaataccacctatcacaaattttgcatacaaagatttcaagccccatctagatacctagttttcctctccatatctcatgtttttaaattactattttgtgtcaccatagtgcacagcatgcttaagacctggcttgctgctcttaataattacatagtgtcattgtttcctccacggagactcacagtggaagctagcaagccaggaacttgtccttcactgcacttgggtcttaaacagctacaaaatacaccgagtttgactcccatctccctccagttctcgagctctctgcctgttggttttcagcacgagtttcaagtattctttcggcaggagaagggctcttgaaaaatagcccatcacagtgcaaattcttttctaatgaatgcgctgggcaggcaataaatctgaaagggatgcatctgaatcccggtccaggtggaagatgctaaactggcctaaggttttcaaatatgcctgtccttagcccacttgcagatattgctgccgttactgctgatgccatggcctgtgtggggaggcagtcctcaccaagaactccctccacaactgctgggtgatggggggattgctgcatgctttctctgttccctgccctcccctttttagctattcccctcctctctgaaatcatcccctcctgactttagtccaggatctccttccagctcctcgccttcctctaaccaggaccaactttctggaaaaatggttcttgcacttcagtgtcaattttccccaagaacatgagcatttcaagctttgagtgctgattcgggaatttatccagtcacaggagtttcccagacagacacttcattctgttgattcagagtcatagtgactctgtgatcagagggacttgagtttgaatctctataccacctttgactgacttttggcaagttacctaacctttcagagtctgccaaatgaagacaatgctattgtcctgttagaaggattaaatgatatcacataaagtacctggatgtgctcagcctgtggtgaatcattatatgtcagttccgtttttctgtttctctcctgaagaactcacaaagcctctttatctgttcaaggtcattggatgacttgctaagaactaggcagaagccaaaggtcattctcccatcagttatcactcctacttgacaatacaccccaggtgtcaattagtttttggtttgacctactatattttactgattctactgatcctaagacatgttttcccctacattttcatttctctaaaactaaagtgcaatctaaactaataggttacactttagttggcaccattttttctttctcattgatacataaaataatgggcacatcttacaacttacaactttgacttgatggacatatggtaattatttttaaacacctgactttaaattccctgaactcaaatggcaaacaactgccctgacctggtgattcttgatgcagtctcttcccaggtgccttgtgctggagcgtctgcaagatgtccttaggtggtgggctgccatctggataaaggggcagcaggaagaagagtttctgggcttctgggacacatgtgaatagagtgcaaatgacacttagggttgcattcttgtgtcagagttcagttggcttgtgcaaccccgcccctgtgtttggccccgagatgttttcccacaccttacacagggaactccctatcatgtaatattcaaagtgggcttttcaaccaacatttattgagtgcatactgtgtattaggccctgttaagcacttgacacgtgtatactcttttaattaatatgattactccataaagtaggtacttctttatcttacacaaacccaggcttaggaattaacttacttgcccaggtcttaaactcagatctgtctggctccaaatgtcctgatctgaatctctctgtccttctgcttctctccaagcctgagttggcaactctgccttacctagtggcaatgacaaaacagcataggagttaagcctgagttttcgttctcctaagaatctggttgacaaggtatgtgctaaagaggtaggggtagcttatagagtttgtagaaaaggggggatggagaggaggaaaacccagtacagattttgagcctttctgagtgaatattcagctccttttctccaggtacactcattccatcatttcatctctggcactgtgccagcatggttccagggccaggggtgactctggctacctggcatgaacagtgccccacttttcccatctgtgactttttctgtcttctgccttgaatcagatatgccccaggtgccagggaaagaggagtatgtgcttgatggtctgtcaagtcaggtagaaagaaaattaacatctctaacagtgagtgattgagatggagtattttccaggagctagaatattatgtgtgtgtgtgtgcatatctcctggaaaaacagagaggaggagacgctcctgtagcctcaagagagctcagtttggtagtgaagacagcagatgtatgggcccattactattagcggggcaagttcttaggggtgtgagaaccaagagaacggttgattggtggaaagagcacaggatttggagttctgaagagcacgttgagctttgtcttttccttgctggctcacttgggcaagttccttaaactccaagctttagtttcagttttataatgtgggtagtccatttttacctcggcctcattgaaagaattaattagacactcagagtgcaggcttgatacaggcctcttccagggcctgggatgtattaattgctggtgctccctcagtggcagccttgatatgcacacctaggaatatatacatatgcgtttgtatatgtgtgtatgggttttaaaagtccgtccttcattcatcaaatatttatcgtgtatctgttctaggtgtcagggagttagcaataaataaaacaggcctgaatccctgcccacggggagcttacaatctagtagagagacaatgaataaaataagttaaacacactttgttgggtggcagtaggggctgtggagaaaggtaaagcaggggaatggggtgtgagtggaggtttacttttaaataagacgatgagggaaggcctccgcaggggatgcctgagcaccatctatgggaatgagggggtcagcagggtagactgacattcgagaggaacgcattccaggcagagggaattgcagttacagacactgacagacgaacggcctggcaggctcaagggcgagggagcggcatgagcagggtgggcgctggttgcaggtgaggggtcccgaggcgggcggagcagggcgttgcaggccacggtgagcacggcagcttttgcccggaaggaggccagagccattgcagattttgagcgggtgtggcgtggtctgacgcgggctatcccaggtgagcatggctgctgtatgggaggtgacgaggggtctgtcctgtgtgcgcgcccgcctggctccgcagtagctctgagaactgccttaagctccggcagcgattccctcaggttagaggcggaaggggaagaaggggcctggagaggtgtggttctcgtggtggcgcggccctcgctgactgtgctcaggatgtcccctcccggggctgcgacctggagccgcgggcaggcagtgaggggctgctgccgagctccgcagcccggggggcgggcctggcgcgtctagctcgcggtcagaggtcgggaagggcgccatgggtgtacgtggggacggcgccgggctgcggctgagccgccagggcctgctgagggcaagcggggcctctcgccttggtggcgcgcaaggtgccttgtgaggagcaatggcggtcccggaaggggaggcggggccgagcctggaagcacagtcagccctctgccggcgaggaactctcagtgcgacccctcaggaagagactgagaacttaaaagctgagggtagaacctgagtgtccaaaaggctaagaggagaacagaagggaatgctggctgaggttacacagcacccatcgtgaccctcgacggcctcagtagctggccgtccccgccctgctgaccgggctcttcccgcgcctgatcactaacggtgggaggcctgggccttctggagaaaagaggctagaatcttccatcttgggttgtgcgggactttattccactgtcagtcacaaagccataaatacatttctccaagacaagaaaagagtaacagcagctaacccttctccggtgcttattttgcacaaggtcctgttctgagtgcttggtttgtactaactcctttaatcttaaagaatgatctggtgaggtgggtcgtattattatcccgattttgcagaggaggaaaccaaagaaggacttggcccaaagacccttgctaacaggtgttgggacattatccaaacgcatgcttctgactttgtcaatctcttaatttcttatttgccacgcggactattgggagggagtttttggaaataacatatacagatacgcacaaaggtcagaaagggaaaataaaaaccggcttaagcccctttcttcccatatccatgtgagcacctgccaggcagctggtgactggcaattttcacttcttattttatgttataatttattgatgtatatgtcatccctcttcctaaggctggagactcatgaggccagagtccatgtgcaatccatttttatattcaccatagtatctaagccagtgcttttaacataataggtgctcagtaaatactaaatcatttctaacgttaaatggatgcatgtggtaaccagctctcacttaagccattccgttctgaaaacaatgagaatgagaacctttaaatatgtgaatcataacacagttacagctgcataatgtttttatggttttcaaaatgcttccgcacagtttatcttgtttcgtcttcctgctaacccttttgagagtgggaggcacgcattacttaattataagaaaatgagaaaactgaaggcagagacaacaaatgagctatccaagatcacaaatgggttttgtttctgtttctgattttgtttttaaaatcagagcggagatcagaaccatcatctcctggtcttcctattttgcaagcagcgcccggtacacacctgttggatacacagcttgaacacaggacctaattgttcgctaggcatgaacaacagggtgttttgactcctgcaagctgctaacagtcttgcacagtgctagactgtgcactagcactatctagaatgtgatcctttgaccggtaggcaggttatcacttaccagtttttggcaagatcaggagcttgtgacagaatgtaaatcagctgtgtctataaacacactgcttagtttgtctttttatttttttttacattttattttgaaataattttaggcttaaagtagaagaatagtgtagagttcccataaaccctttgggaacttcctctaatgttaatatcttgcatgaccataatatagtgattaaaactgagaaactgacatgggtataatacttttaacaaacttcagacttcattttgatcttacgagtttctccacttcagtcctttttttctggtgcagatccaatccaagatcccacatgacatttagtcatcgtgtctcctttgtctcatccaagtggtggtagttctcagtctttccttgtttttttttttttttttttttttttgtttgtttgtttgtttgtttttaatgactttgacacttttgaagaatccgggtcagttatcatgtagaatgtctcttaatctgggtttgtctgatgtttactcatgattagatggagggtatgcatttgttgcatactaaatgcatacttctgaatatcacagaagtgatgttcccttcacaatgtgtcctatcaaagggtaaaggatgttgatgtctttctactggtgctgttaaccttcatcacttggtgaaggtggtgtcttttgagtttcttcactataaagctgctatttccccacttctaataagtatcctgggggagatattttgagactatgcaaatatcatgctttttgtcaagcttttgcccatagttttagcattccctggtacatcttgtttacaacagttattatgtttggctaattatgatttttctattgtcctttttgcctccatatttattaactagacttctcccattaaggaaaaactgtcccttcttccccagttatttatttatttagtcattaatttataccagtatcatgtttatttattttattctatgagtaataatccactactactgttaatttattttcttgctcaaattgttttagctttggccattgggagcgctttctggttggcttctgtgcctcttgacatacccccaacctttctcaagtgttttcttgctttgggaccacaagatattccaggcacatcttttatttccccctcagccctagaatcaactgttactccaaggagtactgattcgttttattggagagtggtagtatgtgaaaaccaagacctgggcactaggtgtgctcattcctatcagcttgtgtttatatggagactctcctgatgaaggaagtagtgtgttgattcacattttggtgctagcttcctatctcatcatatcaggaccagttcgtgactctcccactttgagtctcagtgatctttaagttctgttgtgtcaccgtgtccatgtgactcatctgggggtaatttcaaattctattgaattaaagttatgaatcagtgttatcctttcactcattcattaagtcaatatgtcttgcatgtacactgtgtgttgggccttgtgataggcactgggtttacattagtgagtaaaattctgcctttaacaagtttatactatagtttctttgatggcgtctaggagacattactccttttcttggttctgtatattatcagaactcatctcagattgttcagcattctaaaatcatgtaagttcagcctagggaattttaaattttgattttagattcagaggttgttggaatatgaagataccattccctgtcccagtagctcctggggccattaaaaacctttgcccatgccttgtttctgatacatagatggttgacttcttcagatgcaaggaggctgaagatatatactttgacttgataagacctctgaagtcttagctgctccctctaaccaatactctctggtcagtgcttccctctcctatggggttggggtataggggaggcatcctcctcttcaaaccactctcagaccccaaaaggatcccttcagcaaagattctcttgcttgactttcctccacctacaagtcaagttggatctgggttcagcttcaagggggtcgaaagtgaggtcagttaaggtcatttggatgggcatgatccttactcccaggtccacccttcccacttgatttaatacaatctggcattattccaacacttctccctttggctgtttattagcatttcctttaactttttgagcataaatggaataagaatcactttcacggcccagaaaggtgtctccagcaaggagtgttctgctggacgatgcagccttttcaaacgagtcagttagctggaagtgtcccgtgtctccttttcttttggaaaagatgggagtgctgaaaactcatgctgaggctggttctctgtttctattggttcctttctggcatgtgttaaattatgtcttttgtgttctgaacaaatatgtgttctcagcatgcaaaatatgcacacaatggctgaccgattgcctgttcttgagaggaagggaacactcaagctgtggtgagttgattgccaggcactctgtggtcaaaaatgtgagggcaccatgggtcacctgcatgtgccttgaaaagtaatgtagggtctaggcacctgagcatctgttcgtcaggtgtgccgaagatactgccagagatgggctcctgtatgcaggctcctcaacagcctggagcgttcgccccagctttgagcctggtgtagggccaggggccagattgtggaaatgagtctttagtgcctccctccatttttatgttggtgtttttcacaaaaattttctgtgtgtgtgtgtgtattttaatatatgaaatccggtttagagaacagcctcgtatgtcccatcctgcttgtaatgcagtgatctgcccttgagaattttaaattagctgacctacatagcttaactatttcaattaaaagtaacaggcagtatagattggcaagaggtggaggagagggaggggaagatccctcccaggagctttggttcagacaaaacaatagaagtgacgagcgattctgggaagaaggcatgactgatagttgtcatggaagctctgacaccctttccatgggtgaggttctcacaaaggtggcttctggatatccgcctgctatgaacacatagcctttgtgggatggtgccaagcaaactctcttcaagggaaggattcaggcagcattattccttgctcttctgcacatccgctcttccatttccagtgtctctatacgtggctctctgagggccagtgttctcccagccccttcggcctgctcccgggggaatacctggagagtaaacactgtctgtggtacaggggggccattcttcctccctttccatttcttctctactgttcagaattctgattccacagaaatgcctaattaactcagttgctctgcaatgacaagctaacatctggagctaccaagtcaggaaagccattcagccggggtccaacacagattttctcccctctgcacccagctcagctgctgggcactgcaccaaccctgatgtggcaggacgaggatgccaagggctggagcaacccaaggctaattttttttcacccagaaaatcatgggttagatatttttaaattgctggcttattttgcagcatttttattatttctggtagatgaggagatcttgccatcactaggggtccatctctcccacatgctgccttgcagtgcttctctacgtagaccatctctgggtgatgccggtttacccagggatgggatggggtgcagtgtattacgcttcaggttgtatttgtggcccccttgggaatcagttgcaaagcagggccgtgtctgatgtgatggccaggacaaaggtctgaatgactaacaaagaagctgtctctggcaggcaggtaggagcagtccggtgcaccagagctgtggaatgactcccaggttccatttttcacttccactttgcatccatcctcccatctgcctgcccactgtgtacagtgcttactacatgccttacctagtctaagtgctttacataaatgaattcatttgacgttcacaggacatcacagataggcattaccattgtccctgttttataaatgagaatactgaatcattgaaaggttaataattttgcttatggacatttgcttctggagctggaccaggcagtttggcttcagagtccacttggctctatcaaagtcttgctatcaattacataagttccattccatctcagcccgaagtgttttcagagccggagacctcacagtgtctctcaggacagtacctttcaggtttgaatgtgcccaagagccatctggggatcctggtaaaatgcacatcctgattcagcaggttcgggttggggcctgagaatctcaggtccagcaagctcccaggtaatgtcagtgtgactgattgctggtccacacattgagcagcagtgctgtagtagactactatcatgcctgtgtactaatttcactgtcagattggagttaactgcatttggatagggagctctttcagcaatagaataataccagtaagaatttttaatgagtgatcaactatagtagcagttagtaatcaattttttgtttaaaaactaagtttcctaggactctaatggaaaatggaaaggttatgtccccctttttcgtatctttgccaagggtctttcctttgttgctgggtttaacttggcacttctaggctactttagtcctaacttttctcagttaccattatatgcagttctcccagccacaccccagcagtgtgcaagggatcagacacaaggttgaatccatcacaaaagcagaatcaccatggcaactgcatcctttgattcttgagtgtgcccagcaacctgagcagaggcgatagttgaagtgaaccaagttctcctgagaaatggaggggagtggtgccgggcccacactaggctgtggtatcttcctccctacagtgaggggcttctgtttactctgaagactccagacactcaaaatctcctcccctccctccagtcctgcagttagcctccaggggtttctggtcctaaacttccaccaccatgagattactacaatgccttgtgatactcttgttcttctggtttgagttttggtagataagcacatctgagtcttgctgtgttaatgtgtctgtattttggtgtatctgcttgcttgtcgtgtggggcatatgccaagtccagtagtggatgggctggggaagaccagaccttatcacatggtgcccttggggggaaatcttaattccaatgtgtgaaaccagtgaaagtatgattttctgggtcaattttaaaaatatacgttcaagcaaaaagcaacctgttatctcttctctttctgcctctgcacacagcagcctccattgcctagggtatgatagtgtgggttcactttgtccatctcatttggatgacatcagcgaagatgcattctgtatctctccactgaggcctgtgacaggacctaatgttttgtggagctgagagaaaataaaccaaaatgacccaatggaatataaatgctgatttctgttcctgttgtttgacagaaaggaagtaatgaactaagatgcagtagcctggccacgtgatgtcttgacaggcagctttcagatttggagatgcttcagagtgttgtattgagtctctgggaagaccctaagcactcaattcctagtggtcaatggttggcctgttttgagacataaccagttggaaggaaggatgggcctttctgctccctatgatgttgccttaaaaagacatttcctgggaagaactgggcagatggtggctttaatctcactagccttgttcttcatttttatatccaagcttcaaaaaaccagcattagccaacagcactgtttttactgctaagcaaaacttcaggaaagagcatccttcgatagaacattaattaacaaatgtgccgtcagtccaaatgaagacctgtgctgctccctctgccctccctagctccacctttatttacgtacccaaaacatttccagtggtatcaaggcgacaatgataggttttagtattgaagacctaacattaataaatgcagttttgattgctgttcctatctgtatgttctttaaggaggtttgtttaaaagccaaacaatcccacgggtggcagagactctttgttctagccttcgtcgtcaaaacagacagaatcaggtttgggagcaaggcttctacacaggagcctggaaaactattatgcagaagaagcattttttgttcccctgagtaaccaatatagttagtaggcatgatatgtgtataaactgggatgtatctcctgtgatggagtgacgaggtaactaggtgactttggcatgaccttcccacggaaataacggtgctggaccatatatagacaaagataagctttcacttaatatagaaagaactgaagtgtggccaaaaactgtctcctcacccttgccttcaatgtgatttctgagctgcagactcggaagtttctcacattccttgagatagtggtgaacagtaaaaggtttgggaattggggaactgctataggaactccaccaaaatcatgttgaatcttacagagaaatgggatgagtctgtcagtctgactttcttgtgaatgagaatggtcaggtagctctgacaggcctcaaagaaataggctttggaactgacctaccaagtgccctctgagaagaggactagccattctctgggagcagagggaacctggatgatgtggttctttgtccaaggagagtgtcctggaaaggtgttccccatctaggtattttctctgagaagcagaggatgagggctgaacttgcaggaagccgagaggaggaagtaaagtcaggagaaaatctgcctggttaaggctgaaatttggggactcatgatccagagaggttctgtaatgcctaaccctggttttggaggccagggattttcattttgactggcttcactccttggcttattaaatgtctttgactgagtggctaaaccaccctaagccttagtttccttacctgtaaagtgggaataacacttgtttcagaaggtggttaagaggattacatgacataacacatatgaaccatttagctagcgtcatgcctgtcacatggtagctcgtgaaattttagcagctatttttactcctagttttactacaataacctgactgggaaagcgtccgtgggcagggcaaaagggaggagccgtgaagataatcaggaggtcagcgttagagtgggtaccaaaacagccagagaactgtttgggagaagttgcctccagagcactccggtttggtcccctccatcagggcccactggtcatcgggtaccgtgtcagtcacctgaatgacggtgagggctgggccaataccagctctcccaggcggtgaggctttccttccacacacacaggcttcatctcgtaaggctcttggtgggagacacagctggggcactgctggaggaagggtcagctgcacagacctcgcggccctctgcccagtccctgacgtcaaaagggccgttcattcccagggctgctctctccacccagctgctgggtctcagctcttttcctgggaagcccggcgcttcccgggtaggagattctatcccgacagtctgttctagctcccttccctgtttgtgactgtccctcttccctcccactcgcctcccacgctgtcccccacccctgcctggtttccaattttagcggtgttaccagggcaggttttcaggaagcctgctccagtggctctctcctgggccatttccacagaggctgtgtgcccggctaccattccctaaggctcagccattgcgcccatctgttccccgggctgcagccagcgagcatctgcggggggcggtgaaggctgaggatgcccagacaaggggcagggagggctggcccacgtgatggccaggggagtgggatgcccaagggaaatgtcataaagggtccactggttgggaaaaaatggaaaatggaaataaggttaaaattgaaatgtttttaaaaagtgatttgtgaagacttaaacaaatttctttcaaactgctttattactcatagaaattgtatcaatcaacagtgatcgctaaattgctggatcagtcagaaaatattgttgctgctgaagaatcaatgctaattggatcattagggcattattacatgaaacacaaatagctcaggatggtcgctctttgcttggcttgatctgtagtcttcagagaagcagagaaacctcgattgtttcctgctcagctgacatgcagtttcccctcccttgctccccttcttgctggagttaaaggtggatgctggttgcagacatttccccctatttagaaaaacaaagacgtaccatggtccttgaaatcagtgatattgaacagtcctaaaaagtagagaggttaaaaagggatttggattgcattttagcaatcttctgttggggtctgtgatgtgtgaagacacatctgcacctttactgaggcaggtagaatccaacaaaagccactgatagggctccaggcatggggcagggcctgcactgagggttatggtgacagcggcctgagccacaagctggctggaaggactcctggaggggtgagacatttcataagatctgggaggccagcgtcagcgttgggcacaccatcccccagagtgcctgatattggtgaccttgctgcatggcggatgctaatgggtattgactgaagggacaaggtgccttctccacccatgcttggtcattagcacatggttaggtgggcacgcgtggcctcctcttccacctctcttttggccattttccttgccctctcccccaccccctgacctctggcagcccagagctcccctcagcagtgctcacccaactccctcagggcctgaatttccagggtgagagtcccctctctacaccgtctcagtgggtgcttctgccagggtgggatctcgccagggattatgcttgcatcttaacaggaatttactggggatggaagtattaacccaaatggagttaccacagaggggatttcacatgtttctcaaataatgccagagtgagccaaggtttacataaccagtacgaggtgaggggggtgggaagagggcaagcatttccttgcgaggctcctggcagctttatttctgacttgcgagtggttcaagaagcctccatcctcccacgcatggagaagaccagcattgactgcagccccgctatgtccccgcgctggcctggctgtgtattgtcacatagatgatgtcatggcagccttagagaaattctctgaggcaaatcatattgtccccatttttaaagatgagaaaccagaagccaaggatcctgtaatttgcccaaggtcacgtgaaagagctggagttcaagtcatcccaattccagatctttttatcatgccatgttttttatgcctccccccttgtcccagagtgtggcaagcagaggagagcacgcgtgtgggatgggatcaattgcaaaacgtgtgcagcctggccaagcaggtgggggagtggcaggaccagctatgtgtattctcatgctcaagttcctctgggtcttccgaagacagatggggcaggtagttccagctgctttgtgccttcaccagctgagcactggcaggtggggcatttttaacctcacgccttgactatcccctctccctgtcacagtcagctctgcctattgtcctccgtggctcagaagcagctatccttaatcattcatgggggaattttgtggaaagatccctcccaatgtggctgcatctgccataaagtggagattttttgttatgtttgatcccctgctgtattcccagagaactcagtgtgcctggcacgcagtgggtccgcagtaaatttttgaatgaatgagttcgcaaggcgtttctcctggttcttgcccatcagaatttccatttctcctgctccctgggctggcactaccatgcatggtgcccttgtccctgccatcgccatcatcattcaagctccctgctccatcttgcagcctcatttcttagctgtaaagtcttcccagtcctccattgtccttgtgccctctgcatagcccctcctcccagtcaggccgcatcctccgacctggcctcccacctccacgctcagttttcccagccatactttgctcttgctacattcctgccaccctatctcctgggagtctctttgtccttcaggtcagacaatgcaaacttaaatcttgctgaaataagcaagaaaggtacacaggtgcaggaggagtcttcactttcccgcagaaacatactcacttccattgctacacagagacagcaatgcaaggataatgaaaactagctactgacacttggcctccgtgctggaggaacaatgggggaccagggtaactgtgatgaactgaaatgacaggtgtttcctaaaggtggcggccacagcagacggtcatcactgaggaagtctgtgcccgctgttatgagctcttctgacttttcaaggcaaaaatttggattttgtatgaaacctactgtttcttaaatgatgactcaaaaaaatttattcttaatcaactatgtcagtggcctgttggcctctacttcagggagtcttcctagattattgaggcccaaccggattctttacttcctacctgctcctagttagtgaagcatcgtcatggagaggacagacctctggccaaagaacctaaagacttgggccctggtcccgggtctgcttccagcctcagtttccttgtttgtaaatgagagcaataatatttggcttgtccaataatctaccatggtacagctgtgtggcttgtagtttcaaagtgctttcatatgcgtgatttcatttgatcctcaaaagaaccctgtgtggttagcaggggcaagtgtggttattcttaatttaagaggaaagaactgagggtctgagaggtgaagtgacttacccacgatcatagggtttataattggtagagctggctgtgtcatttgggtcttttatctgctgtgtggtttggtgttttgtttgaacttttggatagaatgagatctgtctttgtaagctgttaagtgctatgtgggtgcataagaaggagtaaggagcttacttatatgggttattactaataagtgtatgccctccatttcctcatagtgtggcactcatccatacaccatggtaattgagctctgacgatttgatatgtcatgatcttacctctctaaccaggttgtgtgtgagtacctggaagcagggatgaagtctagtgcagagaggcccatagaatcatttggtaagtaattgctgatgaattgaatcataggaaagtggagatgccacctgagagagaaccataacttgaaaccaaagctgggctgtgcctgaggttagtcaggggcctggtggctcatagtcctaaaccctcagctcatggtctgctggtagccactgatcaaacatgcatgatagcacgtgtgactgctgccatcagtgcgatcaccatccaagaagaccacatggggggatgatgagaaggtatgaaatgacatagtggaaatggcattttggagtcagatctgggtttgactaatccctggctgtggggcaacttaactctgttgagccttagtttctttacctatataatgggataatagtagctacctcatgagtctgtccctggaacaggccaggtgctcaagtgcaatgtgtagtccagttataaattgctttgttagagcagtactcacaagggcactgtttatctggttttgccaatgctgggcactgaattcctcgctgcaattgtcagatgaggttcagtcaatacaaatattcctttataacagtactggtaggagccttttaacttgaggttttattaagataataaagacaactggagaatgactaggtgcacataagggaaatggtgctgttttcaattaaacttcaggccaactatgtacaactatggatatagaactgagttatgatgtggaattccagtttctctccactgaggacctgggtgaactgttaccagagagaagcatctctggagagctcccttaagcatcctgcccactctgtggggccatcccctgctgctcttggctcagattcatctatctgtttcagggcctttgccctcctgagtctgtagttagccacttgctccaagagtctttcagctacagccttcattaatttcattgtgaaggggccttcggctcccctagcatgcgttgtgggacgtcagctgcctgctgtgctcattaccactagcccaggaatgcggtgttgactcatggctgcagctccgcttttgaacagaagcactcagggcctgagcctgtatttatcactaggcagggaaggtcctaagggaaggtgccaggtgaacacagacctcatccttccatcattacctatgcaaaacactaaatacagtcatctcctccggaaactgccccccaggtcccagcagtagttcaggattcccctgttaaccatgttgtgcccactacctttcaggctgcacacacttccctctgtgtttagagagaagggaatgcagaagtctgccgtgtagggcatgaggggtgaagccacaggtcagtcctataagcacctcctccttcctagagcagagccatcacctgctttgggctgtgccaaggctcttgttgagcagttcagtgcctcacgtggactccccctgcaagaattcactgaggattattggttaatgctgataaagcacttgggctgtaaatatcaagtttaatgttaataaacagggggattaggttcatttatgtaaaagggaatgcttcacaatggatactgggcaggggaagactttacttttatcaacaaaaaacaaacagagtaaactgtaaacccagacccatcgaagccaaggccttcttgtctgctcaccctgacattcccacagggtttttctctggggctgtaaatgcaattctgctgctgaactgattgcctgaacgtacttgtgtgcttgatgtctttcaaaaagaaagtgtctaggaaagtgcaaaagaggagcaggcaagacagaaacagcatggccatgtggaggggccgcgctgatcgtgagagcaaagggaattgtattattctttgggatttgcatactttaagaaggtggttcaattaatggcattctgttcctcctagttgaagacagcaaaatggaagcataaggatttgctgagtcctccctccaggaagcttcttagctgagccattctcagctccattctccattgagaacccttcagcacatgcatgcttgcttagccacccgggtttaaattttcattgactgaacagtaaaggggagaagcaaacacacatgagatctctgagcagtgtgtttcaggtgctttataataaacctctccttgccgggagagtgtcatcccatttcacagaccaggcaactgaggctcagagcgggtggtctagaatgtgcccatgcttgggctcctttccttgttcctcccaaaggcagcagttatactatttcctttgtgtaaaaatatttatctttatgaccccagaacacctagtacagatccatagccatttctctgtaattctgaaatccccaagtctctgaaaagtgaaagttcatttattatccctttgacagcaaaatctggcctttcctgaattcatctggggcagagttgtcctaaactgacacaagggtagttgcagtcttatttaacctgcttagagtgaatattcatatgatttactgcagaaatacgttggcttctggggcccttcaccctgctgtgctattacatacagtagatatgcaaatgactttacctgacacattctgaattctgaaatgcatttggccccaagggtttccaataagggaccgtggagctctagaaggccctgcacacagtgagcactacctgcatgttgttgcttagttggagtgaaacctcagtaccctaactttgtgcgtggtacacccatggtgggatggacatagaaccaggccccctgttcagagtcaccacaaagcacctgccgttagggtggcaggaggaagggcaagcaaacagagcaagagaagatggtgccggcagcaaacagcacagggcatggcgtggggacagttaaggtgaacagtgcccacagtcagtgctgtggcaggacaactgcagtggggcaggctcggcagagctgggcaggggatgcagatgctggagaccttgctgcccagcagatgagagtggacccaattctgtagatcgggggccgaggctgaattctgagcaggaaagtaatctgctgaataggaggctgtagtaaggccttttagatggtggctcccggagtgaacaggatcctgaatctcaggctttccttatcccactgagccatgcctccctgcctgaaacgtgtttctgagtaatagcagctaacacttacacagtgcttcctgtgtaataggcactcctgtaactgctggacccatgacgactctgtgcaattcataccgttgttgtcccctttgtatagatgagaaaactgaggcacaccgagggtaggtcgtcaggtcccgtgagtcgcgagtgtgggggctgtggtgagaacccagccagcatggtgtgtgtgtgctcttaactgctacgctctgtcctaacctgttcttttataggtcccagcaaggaagcttttctcctggtccacaccgctgcctgggcatggagaaacctgctggcacattggccaaggttgggggtgaggggtgatgtcatgacccatccaagaactgtaatctcctgtcttcaaggaggccagttccctgggctgacgcttcatgcatagcggctgcatccctgtctccccacttctccatccccttccaggccgttcttcccccatgcacacacatgcctacacatgcctgcaataactccccgataggtagaattaaaattttgaaaaacttaagctaagactataaagtaagaaaggctaaatcagcttccttccttcttccctttgactcctgcaaatctgtagcttccttcaattcattctggaatttttttccagttttcaccctgattatcctttattcttgtcttaaaaataggcaggacattttctttgggcagcggggatggcctgttataaccttgctctctctatatggtcacagtgcattgcatggaagttgggagcaccctcgccttttcctgtgaggtcactctttgatttcctgcaccctctctgccctgtcaatgccgcagggtctgtttttcctataagtctgatgctctcttgtccttgaactccttttccgggtgggttttaattagctaaatttgcatgtgacaaaatgagatataaccttcgtggggaaattcctcacagctttctaggctgggagaaatcgaccatgccattttgtgatggagtgtcccagtttaacacggcaatgtgactgcagacttcatccgcctggtgggcactttgtccccatggctgagtttcaggcttcctgaccttcctggtgggcagccacggcgaaatctagacttcctggtccctcctcagttccctatggacgatggcaagattttgcaaagggacaaaaggaaacttttgctgaaaccttctaggtctttaatcacttgttctttttccttctaaaattctggattcttgccgagcctctttgtgcttcctcttttcattctctgtcacctccacttagtctcgttctcacctgctcctttctctttattctccaagggaggggaagacaacttgaattttaggaacaaagcaagaaacagtacatggaaaggagaaaaggtgctgtggccactgcagaggggggacaggtggctgagaacctttgtaagccagaaagaactcttctctcccattctcaaatataattagttatttctaaaattgagctgaatcgtgggcatctttttccactcaaactttttttaacttaaaattaagttctatgtatatatgtgtgtgtgtgttcattggagaaacagtaacaccacacacaacttagctaacctaggaaggtttggctcaaatgtccattgcaaagtaattaagaatctcctctcctatgctgtgtttacactgtacattcccataatgtccacttcctggctgctggactctgctctataaatataaccagtgagcagtgtctctttcatgctcagctcctgaccagttaaggggaggaggagatgagtccaggaaccagagttggatgctgggaatctccgtgctgtccttccagggaacatttctctgcaccgggccaaggacccacgggatcatccctttccattgtgaaggaaccgaggccgcctcactgggctccattttccagtatttttagttagcagcctgcaagtgagtgttctgcctgcagtgctgtagaaactggcagatgctctgtgttgagtggtgtgcaggacagacaggagtcggtgctggagaggcgatggctgcaactggggcagagaagtgagccttcctgtcttcctgggggtgatcatccccaaggcagtgcatcacgctcccgtgttcaaagccgcagtggtataaactctcgaagagaacagtgtctacctttactctggaaagaagtaaccgaaagacaggagcggatgttgcctcctggcaagagggcctcacggtgtggaggggcaatgccaaccttggcggtgacggacttaggttctattatggctctaatacttgctgactctgggaccttgagcaagttatggtaaccctcagcctctgtttctccctctgtacaatgagcatcacgatagtcctgttctcacagagctgctatgaaggttgcatctgggaagcacctggcaccgtgcctggcgtaaaataggccctcaggaaatgttggctattattatggccatgcttgactggcacctcagtttgatgtagtggttgtcacgtttcatttctagcgttctgaataggctgtcagtagagaggtaaggaggtaaggactctggggccagactgcctttcttcaaatcccaagcctgccacttaacagctctctgacattgagcaagttaattcatgtgactgggcctcacttttctcatctgtaaagtgagtatgaagtgacgtatacttcactgggtcatggtgaggggaagtatgcaaagcaggagttggtgaactggcgaacaggccacatccggcctgccatctgcttttgtaaataaaatggtatcagaacatagccacacgtatccatttatgtcttgtctgtgactgtttctctgcagcagcagcagagatgagtaattgtgacagagactgtctgtcctacaaatcctaaaataaaatcctaaaatatttactacctgaccctttacagaaaaagtttgttgccctctgattgtaaaaggtttaaacagtgtgtggcacagagcagatgccaggtaaatgtttgctgttattcctgctggtactcctctgcagttcgtcacccccaaccctcacattagctctgtgaagtgggcacacagaggtgatgattgttccctgtttattgcacctgggattcaggggactcacgtgacctgtccaaggtgaggccaggcctaaaatctagtctagggctcactcggccggtggctccgaatcagtgacatctgccttgccttctctcttttttttttttttttgagatggagtctcactctgttgcccaggctggagtgcagtggcgcgatcctggctcattgcaagcgccgcctcccaggttcacgcgattctcctgcctcaagctccgcctcccgggttcacaccattctcctgcctcagtctctcgagtagctgagactacaggcgcccgccaccacgcctggctaattttttgtattttcagtggagacggggtttcaccgtgttagccaggatggtctcgatctcctgacctcgtgatccacctgcctcggcctcccagagtgctgggattacaggcgtgagccactgcacccggcctgccttgccttctctttagattcctcaaggacaaggatgcatcagtccatctccctgaggcatggacagtgcctcacagagcccacccagtcagtatctgcggagttcatttgtcttctgtgctccacctggccagcatcagcactgagcactccaggaagagacatttccaaccctgggccgttcacctcccagcacctggagttgggagcactcagcttattaacagggcagaaactcccaggttgcacgcacagcaccgaatcctgaagggcacaggccaagaccctctctccatcccgagacctttagtcaggattgtgggtgtggttgatgacagctgatatctgggtagcaatttatggttcactgaacacttttacatccatgatctcatttgatcttcatagcaactactcagggggacaaactgggtgatggcctacgctgtagctgaagtggagagagactggcacctcctccaaggccatgcgttaaatacccactgagccaatggagccctggtcatccatctctaatccagtgacctcccaaccccagccggccctcctgacttgatcattgtggtgatgccagtgctgtagccttgggcactcattccattgtctaatgaccctcactgtccaataattcttttttgtctgtaatggaaattccacatgctttaggggtttgttctgctctcagtggagatgacgacaagccacccagaataatagctctactttttagtcttcagccttgaagctgtcctctccctaaccagcccaggctggctcttctgtccttgtgggtttgctggaacacagaccatcccatccaccctggtgacttctaccacatcctgcacttagagcaacttccagcatgacgcagaaggagggacagtgtgttctgcgttggctcagcccgtctgcagaacagtcatgtcactttggaagagcctgagtttgagagggatgtgtgtctgctcatatgaatacttcttgatcatttagtttctgtcatcagtatctggggagtggagaatcgttgctgagggcttctgaagagcaggggagaaaatagatcacgttgacagtcagcataaggtcatgggggtgaagggcaaagggaagctgagttgctgctggacagtgtggtctactgacatgtctcctgggatcgtgaccatcatgagggcaggcggtcaatggctggtcagagctatacccagctttctagtacagtgatcctaaaggacatggctgaagcgtgttgaaatcctcctttgtaatgaaaattctcccctgcaaggggagaagtagcttctatgaaatttccagcagaggtttccaagccagggaggttgaggtaggtcagggaggccgcaggtgcttatctaagtggcactgccacagtctttgagtttccattactggcctcctggattcagtggagtcctgctagacgttgtcattgcagggcaaccaaacccagccccgggcccatgggaatgaacatacatatcttctaatggttagagaaataaattgctttataaccaaaatacccttttggttatgtgtctctcttggaaaaataatcagaaacagctgccctgcagttctccagagaatggagtcttcctagtttccatgaagcgaaaatgtttcggaaatcagaactgaatgaggctggggcgagaggtggggctgaggatggactcctggcacctcctctgattgatcctaaatcactttctcactctggccttcggtttctgcatctgttaagagggctaatgaaacctgtttcttactgcaacttgacaccatgaaaatttagtctctcatctgcagcaggcttaggcaaagtggctggccacataaaacagcttgaatccttgagcatggtggatggagtttgtttaatgagtgaagctgtgtagcccactccatgtctgtcctaccattaaaatttttattgttatttgtgaagtatccactggagttcagaaaaagactgcacaccactaaatcaagttggctcagctcctgctgcggttaaaatgagtgctgtaaccccaattaataacgatttttttccaccagagatggctgcttggatgaatgtattatttgctgggggctcttgtggggcttgcttgaagtgtgtaaatagtccgcctgaaaaagaaagtccaaaaaagggctggtttagacagagtggcctctgcaatctggccacagtcaaaggcttcttcacatcagcagctctgatacgatacacaaacgtttgggttgtaggacagtgtagaaagaggaccctctgggaggccaacgtgctgagtggaaggtggaaggacatggaaagcagcaaccgtgcagctgaggctaagaagccccggagcaggcttgggggcttcttgtgtgagtcatcatttgtcctccactgtctatcaagaagcagggacaagagttatgcactttaaatgtcaaggttgcctttgtaggtggtagaggcctggtgggttccaggagattattcaggttctatgtagagcaaattccagatcagatgaaggtgtttgtgcggggacagctgtatgttttctgttacagacctgttaggtcaaaccccttctttcttttttctaagctcttactcttccccagtttttacttcccaagactttcttgggtccttccaagtcctccttagaggatggcactttgctgggtccatgggtttaactttttttttttttttcagtctttcccatacattcgagttagcttgaaagtgttgatggccctctcccgcaaaaggaatatcatttactccctaccccttgtgttacatgggcaggggaaggagggagtttctagctcatgttcccggaagggaaggtatggcaggaacacatcccacttttccctgtctctttatgcccttgtccccaggggagaagtgacctatctgactggtgagtttggtgtagccccttctgggactctcttttgaatccacttatccccaaagaagggttcaccaagttattgggactgatctggccctgtggggaaaacctgtgatggtctcaccttctggcagggtaagtacatttaatagtggttgaaatattaggaagtccttcgaagcccgtctaagccacttcctccattttataatttgtttctaatcaagcttttggtttgatttaatctgtgtgtcctatatcttacttcttaattggttctgagtttataaggggcagaaaggatgattatttattggctgccacccaaaggcttagaactcctccttggtcattgactgatccatgtggaaggctctccaagcagctctgggtacagtggaggccaaacatatgtgcatacttttccccaccagggtactatttgcaagtcattggaacctaagtccgtggcttctgttttctaagaacatctgctgtggaaatgctattcttttcctctttcttcatccctgaaataatgataccttcctcgcaggagggtgttgaggattaaataaaatcaagcacattcacacacgtaggtagtcagtaaatgtcagtttctgcctctccgtccatccactggtaacctacattgtttaagtagcgcttaccactattcattctgatgtccaaagtatgcctctcatgttgcaatggaagatttcttctatctcattgggagcacttaataacctttaatacatgatgtgaaaaccttctgtctcacatgcctgatttatgggatcactggagagagaaaactttgaaaccaacagggaagtaagggatgcgtactgagtgggagaagcaacagtactgggatccaggggagggctggatgggaagggctcagtcatggataggactgagggtgtgctggtgagcctggaagccatcactgggtgaccaacctcacctgggcacttcttagtttggatgtgccttatttaaagtaaaacttgacacagtccagaaaaactcgcaatgcaaaaacaactcacttttctggagctttactgtgtgtgcccagcactgtgctcaccactcgagagcccctaggcaggcaccctccctccagttgttctcagggagtggggtggagagtatcagtacagaggagagcctcaaacgaccccagactctgtctgtcagtatgcttctggaggatgtaggctgagtcttatcttctcaaccgccagttgtctgtagtggcccttccatttcatgtcttccttagacacatactccagtctgttgttttgagtgttggctgtgaactctgtaaccctgtattttctgttttcctcttagtatgagaacgaaggtgtgggcccggattgccccattactcttgtgtcctgtgcaccttttgtatcgtgctgcggcaaactggcacaggggatgtcagctccgcaccctctgctgtggattgtccagggtccaggcttccccttcctactgctcacccctgtcccctttgctgttaacacctgcccgtgggataagggaaaagaaaaaagccactcaaactactccattgtgagatttgctatggagtcagggctgaagtggggttggttgacttgcagaatctgtgaatgggggacgatatatgttgagaaagtgcctgggtgattctgatacgtcccatctacactttgagaactacaggttcattaccactgccaagaaaaagatcttttcatatccccccgtcctctcttcacttggatggcagttgagtctctgaaagagattcatcccgaaggtcttttaagtgaagagaggcaaagcttagcttagtatttcctttctgaagagcacatacccctgtgtaaaattgaggagcaacagccttaaatggaagcagctgtgattccccgcccctgtgaaggggctgtggccctgcagatgccacggctgtggatgcgtagagcttgggtaccctccctggcttcatggctgacctgctgtgtgaccttgggcaagtcagatttcctctctgtttgccatctgcaaaatatggatacagacccgtgctccctcctggttttactgaggtactgtgagagccagtgaaatcacggttatgggatgctcagcattctgctgcagaaaaaaaaaaaaaaaaaacctagttactaggaaagcaccattccccaggtgtgggagttctcagtacctgtgtggagtttgctaacagacctggggtcattcggggtgtgacaggcaggccctctctcctagatccaggtccatttactaatgtccttgcccatccatgcctgcaagaaggaagagatgtctgaactgccaggaggtggtggctacagatggtccctggcacagcaagaaggcagtgccaatcaaaggaggtcggcctcttcaattagaactctgagcagatggggctgaggcagccagaaggggcacttcccagtttactaagtgtgtgacagtaagctggtggccttcagaagaccaggagggtcacctggttcatttcctttctggaaggaagggcagtgtttaggataagtcagatgagattcctcctcattggacagataataagctttattgtgagttaagcaatatgcttggccctacggatatcacattaaacaaaatagacctgaccctgaccttactagtttacaatcacacgatcctgaccttactagtttacaatcacaggatcctgacctgactagtttacaatcacacgaccctgacctgactagtttacaatcacacgaccctgaccttactagtttacaaccacacgaccctgacctgactagtttacaatcacacgaccctgacctgactagtttacaatcacacgaccctgacctgactagtttacaatcacacgatcctgacctgactactttacaatcacacgatcctgaccttactagtttacaatcacacctcctgtttcttgccacttgcacacaactcagggatggggtaggaggaggaatatcataaatgcaaattcctgtgccttacactggagctactagatcagactacctggaggctaagcccaggaatctacatttttaacaagcttcatagttcagccttgcacatattaaattttgagaactggttacttctccatcaatgcatggggtaatcagtcaccttgggcacattggtgtcttaaaaatgacttaaacacataattggaactgttttgctaagtctagcctgtgtctacgttgctagaaaagccctttttccccttattctgatggtatagaagaaaacaactgcttaaatcaaatgaattaatgtgttgattgagctttcattacctgtctagcttcatgctgtttggaaaataaatataaaagctataatcctggcccctgatgagcgtacagggttcttgagttgataaaacacaccagttaaccagttagagatgacgagaagatggtgcaagattaagagccaggacgtaaagcagatggcgcgtttccaggggtagagaaatgaggacatcggcaggtcagcattgcagccacatcctttctagccatcctcagattccagcctaatgatcagttgtaaactcctaaagaacttaaaaaaaatcctggaaaaattcaggagattcagggtgtagtataggaatctgtttgattaaaacactccacaggtgattctgatgggtgtttccaggtttggaaaccagcatgctaccttttaaaatagtaaatggattagttatctcttttttagagggggcatgagaacaacagttcctttatccattcttctattacaccagatatgttacagttgcactcaaaaatcgtggtgactcaacacaacagaatgtaaacccaatcaggacgggggtggctctgctccatattgtaggggaccagggctttgctgtcttcgttggtggctttccaggcctccctgggtgttaacatccagcactcagacagtcacagaggaatgaacacagttgtttgtaatggcggccaagatcgtccaggcccggaagttgtgactatcactttcactgacatttcactggccagaagtcagccatgggccacacctgtctccaaaggaggttgagaaatgtagtccagctgagtaccctggaggacgggaccaggctgtggtgggacagttcagtcttctctagcacagcggtctccaacctttttggcaccaggaatcagtttcgtggaagacaatttttccatggaggaccgagaggggatggttttgggatgaaattgttccacttcagatcatcaggcattagattctcatcaggagcatgcaacctagatccccagcatgcacagttcacaatagggtttgctcccatgagaatctaatgctgctgctgatctgacaggagctggagctcaggctgtaatgctggcttgcccaccgctcatctcctgctgtgcagcctggttcctaacaggccatggaccggtacctgggggctggggacccccgctctagcgtgttcccttcctctccaagtctttaagcattttcattgatctcttctcctccagattctcccaggttctcaagcagtgaggttccaaactaaggtttaactctctagtcttcagaatgttcttttctaactgttagaactgcaaagacagccttgaaatggtatattctttatacctgttgcctccacttcacttggtcttactgttaggtttaaccttaggaaatcactgatattttttgacctacagaagcggcattttcatacaagtgaatgctacactctcaacttgattgaagagcaccctcaatctgccttcagcacgtgcactcccactctgcagtaggcagaggtttgagaaccaagccaaaggaaagagaagagggaggcagagtttctttgtactacatctcatcacctgctgtgtttggggtctgccctgtcccaccatagtaaagctcatatcccacctcttcctgaaaccttaataatgacatcttatttctggttatttgccagaagctttcacacacatgatctcattcattgctttgaggaattcgcttgtttccgcctctcaatttatgagataatgagagttatgtaataattcccttcttcagtttaactgccaggaaacttaggccagcatttgtgattagtcagaataattttactgtgtgtttttggttggtatatattgttttaaaatatgtattttactcattaatttttgaaaactcattttttcctcaagttttttttttaaatgtgaaattttaaaaatctcaagttcttaaaaaatgatgtgggataaaacaactaaatttaattatatcatcgtctttggaggacggtgttatcttcatcttgcatatgtagaacctgaggtccataaaaaccaattttccgagcccataaggctcctcagtggggtaactgggactgggtttcccaaccagatttaatccagggccccttctgctgtatcaatgctgcccttccagactgtccctttcatcatcactttaatctcttccctctcgatttcagataactcgtattttaagacgcctgaatattttctatcttattattgtagatatgtgagcatcagctccttaaagttaccgaatatttctgatcaaattctggttatttttgtctcattaaaatgaatatttaagttttcaggagagaagaaggcacaaatctcccttaaaaagtaatccatttgagagatggattaataaagtaatattatgaattcaatataaattaacatatgtgttttcaaattccaaaaatagatgagggagatggaattacactagtgagttcagcatgattcctaaccaaggccttttcataagtggaagtctttcacctggccctggggaaatcacggaactcaatatttccttcacttaattgtttttcttttccatttaaggaaaggtagcttaaagcagtggttctcagaatatggccctgaaccagctgcatcaaaatcacctgggaacctactagaagtgccgattctacaaaaaggaagctccccacaccccgccctgccccacacgggacccagcagtttgtgttctaacaagcccaccaggtttttgtgatgtatgctgaagtttgagactggttagcttaaaacagcctctgagaggggctgcaagccactctttatttggatcataactaagtagttaaaacatccctgagtgaattcaaaatgctaatgaggaaaattaatgtctttatcaaaaaaagaaaaaaagaacaaaacaaacctcaggagaccagaagtaagttgcctctttaagaagcagagccgctttgagatgttgcaagggggagctaagagcagggcagaattttccagtgtcttttgacaggaggaagtggttggggacgacttatttttttggcccggagacagcctgtcattattagactaagcattgtatcagatctaagtgtgtagctttcttaatgtaatgcagagcaggagctatacgttttgttttgtttttcattttatcagtaagaatgagtgcattacagcctgggcaatgtagcaagacctggtctctactaaaaaagtaaaataattagccaggcatggtggcacgtgcctttggtcctagctacttgggaggctgaggtgggagaattgcttgagcccaggaggtggaggctgcagtgagctagaactgtacttctgcactccagcctgggtgacagaaagcactagtaatagctttgtgagctaagtcccgctttcttgggtgttctcatggtcatgctcagagaatccccctctccccaccagcatccaccagactgcacactggtgtgcaggagaaaccagcttgcctggcagcctgggtccagcagtcccaaaccatcagaaggaagaccgacatcctgcacctccacatggtcactaattccctgctgtggggggcacattttggcctgacttggctgacacaatctggggaaaaaagagaagtatgggctgagtactgtggctctcactggttaatcccagcactttaggaggcagcagcaggaagattgcttgagcctaggaattagatcagcctgggcaagatggtgggaccttgtctctacaaaaataaaaataattagctggccataatgccacgtgcctgtagtcccagctacctgggaggttgaggtgggaggattgcttgagcccaggagtttgaggttgtagtgagccatgatcatatcactgtgctacagccttggtgacagagaccctgtctctattaaaaaaaaaaaaaaaaaaaagaacaagaagaagaaagagacagaaagaaaagaaagaagagagaaaaggagaggagcacagattgctcaaccccatggaggcaaggctctcacttctgctggtggggccctcggcccgtcctggagtcggggtagcatcatggttgagatcacatggactccttggctaaagtcctgttttgaacacttgttggctgtgtgatcttagattaggcactgtttctctctgcctcaacattcttgctcctaaagtggggttaattatatataccttgcagggctattctgagaattaaatgagttaatgcagaagttctgagcctttttggtctcaggactcctttatattctcaataactactgagaatcccagagagtttttatttgtgtaaattatagctactcatgtttattgtattagaaatcaacttaattcattaaaaaaccgattgtggccaggtggtgtggctcacacctgtaatcccagcactttgagaggccgaggctggcagatcacaaggtcaggagatcgagaccatcctggctaacatggtaaaaccctgtctctactaaaaatacaaaaaaatttagccaggtgtggtggcaagcacctgtagtcccagctactcggaaggctgaggcaggagaatggcgtgaacctgggaggtggagcttgcagtgagccgagatagtgccactgcactccagcctgggtgacagagcgagactccgtctcaaaaaaaaaaacaaaaacaaaaacaaaaaaaactgattgcatgttaacataagcaatattgtttctgaaaaataatttttttgtaaaacaaaaaaacagaagagtgacattgctttacatttgtatagattagtgtctgacttactagaaaacagctgggttctcatatctgctctgtcattcagtgtgttatggtatcacatcatgtaggctctgggaaactctgctgtgtatttgtgagagcattacagtgaaaatgttagagttgttataaaaatagttctctcctcacagatacacgaaaaaggtctcagagatcctgctggggttccttgggacacactttgagaaacactggattaataagtcatgacaagtgtttagtataacaccttgcatatggtaatcactgagtaaaacattattacaaacagcactatttactaggagatatagcatcagaggtggttttctatacatatatgggccaagctctagaagggtccttgtgcaacacacacacacacacaacaggtgcttctgctgttgccaccagcagttccatgccatcccatctggctggggggagccctgaaagtgtctggatgtatctgaagctgctgtgctgggatgtgtgcagtactaatatgggaatgacagtgagtggacattgcatcacatagtagcctttcctcctaggaggcaaagcactcacctccccatcaccctgcagttatcctcatgggggagggagccagtccagtcccttgggaaggcagtgccagggccaggacctgaacctgcctttctgatctacagcagagtcaggctaaagagggcaggcagaggctcgccaaggggcacagtggagtgcttcaggactcacagttgctggggctgaatgctggaaacagcttgtcagttcaacccaggagatgctaagatgcaggctagagtcgatgacttggtcctcccatcaggggcttgcagaccatgtgacagtcagctggcactcccttgacctttctgttgagtccagaaaccatagtgcaagcagtgggctgaaagctgtggcaagctgctgtgttggcatgtaatttggaaagcctattcacttagccacctattaaacacctggtgtgttttgagtccccagtctgttttcttgttcatctcccaccaagggaaaagcaacattgaccaatcaaaaggcaggctcagtcttgtagtctcagtagtacagtcttccctgtggccaagacggtgtcttcagcatctgcagtggtgtgtgcagccataggttgacaatgaaatgcagggagccaggatcaggaatctgacctgcaccaagagctgtgggcagaacagaccagcatctgtgtgatgctgtggctggtggtgcaggaggccaggaggcatccaggagccagagggatgccttgcaggactggggtggggtggaggctgtgtctaaaatatgggatgaatgctaagaatcagaaagttagtgaccgcaggcagaagctcagaaacacacagcagatgtgaaaagtgctccttgcccctgctttttaaatgttatctgaatgcccacagtgggcagaagctactattcagtcaacaaataatggtcaagggctgggcattgttgtaggtgcatcactagttacctcagtgaataaaacagacaattcctacctgcaaggaggttgcacttttgtgggaagaagaaaataaaggaaaggagaacataaaggaaaaaatataaatacgatacataatattagacacagtggagggatgaatgcagggatggagatagggtgcttcagggtggggttatagcttttaatagaggggtcagggaaggtgttactgtgaagataacgtttgagcagaccagtgggaaatggcgaggtaagtgctgtggatctggggagagggcattcaagggagcaggagggccaggtgcagaggccctcaggtgggagtatgcccagcgtgtctgggagcaggagggccaggtgcggaggccctcaggtgggagtatgcccagcgtgtctgggagcaggagggccaggtgcggaggccctcaggtaggagcagggaggaggcaggtatggctggaacacagcaagtgctcagaggtgaggtcagtgaggaacagagggcacttagggtcttgtaagtcattgtgatgactgtggtgctaacttggggtgaagtgtgaagctagtggaggctttttagcaaaggagtgactgatctgttttgaaagagaatcattgctgggagcttctcggtgttggtagaagtgtgacggtcagtcaggaggctggatcagtaatccaagaggcagatgttagcagcttggaccagagtgataaaggtggaggtggagagaagttgctagatccttgatacattctagaagtacaccagaaatgatctgctaacagaccggacatgaggtatgaacaaaggaagagggaagatggactctatatcttggcttgagtgaatggaaggctggagagtcaccatgatccgagatgggcaggagctggttggggtgggggaggctcaagaattggggtttggacatgccaagtttgagatgcccaagtagagactgactgtagaggtctaggctggagcaggcagaaagacccaggatgtgcaaaggaaagagggaaacagcagcagtagcacttgttcagccaagtcctgcctcggagatcaaatgcataaaggaaaggaaatctcagagccagcctctaaccctgagcttaatcccaaagagcagcagagtagcctggggtatccacccctccaccccggtggtgctgcagagcccctgttgcactcacgggtggcaagaggcagggctcaaagcttacctcacaggtgtgactcccagggagtaggggtagggtgaggaccccgctggaactggaatggactctcctgtatagtgatgcctcctaagcctggggatgcctctgcaagggctccagggggctctcaaagaggagcaggctctgcctttctcagatcagccctctggctctgttgttcccttgggcctgtcttcagataaccacagtaatccagggagatgaaattggcagatcagaagcccttgattagacctgcagaatgtctgcactgacaagaactgcagaaagcatcccgttcaactccctcctcttacagatgggggaactgaggtccagggagatgatgggacttgtccaagttagaagcttcatgacctagggcaaatcacttaacccttgcaatcatgccaagttgagagcattttcctaaatgctgtggctcagagatggctgtgtgctcgtggttcctcctgtttctccctaaccctcttccacatgggttttttactgcccgatcagggtttggggaatgattggcagcccggaggccagccagcccttttggcaatccagtcaaatctgcccactggctgatgaaacatggactcccttggcagcgagtacttcctcaagagatatcttgcttaaaattgatggcccccctttggctttgctattccccatgcccttggtggggcagagagttagttccatcccaagttcttctccatttgccagagtccacctccaccccagcccagagctgtttgctctggcttgccctatcctgcgttggctcctttcactctctgcaaacccttctgtccttcccgttgtctgagctgcctttttcttgactacttcttaagcctctggatttctccttaaatatcagctctaggacgcctgcctgatgagctgaggtcattcctaccctcaagtgacctggtgaattaagcaacaataccagggattccaggacagtgagtttgaagatcagcatctttgctggcctgagggaggcccttggcctgctgggggtggatagagtgatgctgaccttctgcacaggctttgggagggaacagttagttaccgcaaatgtctggctatctaggtgaagcactcccgaccctctgctcctcaactgtagttgtgaattacagagctggaaacagcacacgggagcatttgttccactcctgtttcagggacaaaacttaggcctgggtctctaaaaccagaggtgcttgatgcttcatcccaaggctaaaggggcagatgccctctctatctggcgttgtggtttcctctacttccaccttactgcagagtggggggctggaacgttggcaaggatccaggactcctgtaccctatctcattctcctcccacacccctgtcccttcattacagatagtccaacctctttgttctgtggttgctgaatagcatcccccaggggaccatcttccctgcaaatgcagggtgacgctgtgcagtggtttctctgccatcatcttttctctgctggggatgccagagcataaacccatggtgcaatggaatgtgcctggtagcaaggatgaagacgcgggggctccagtgtgctccaccccttcctttctgtcagcctgagtgctcccgccccctttgggcctcagtctcccacagagagggagagctgggtggcccagcaatctctggagccccttttggctcagacctcctgcagttctctgtagcctcctggttcccagtgtatttttaaaggatcctgtgttatttatctcagcatctctgcccccctgcgctccacgctcctatccatgcagtaatgacatccaaacacccacactgtatcttaacaatctgatgagataaatgcctcatcgttgggctccgtggacacagagtagcaattctattctgctatcaaagagctcagaaactcaggcaaccaaggcaggatgagcaggcatgtggcttgccatgtgcccatcattgggcaaaaacacattctccctgccccaaagcccctgtttttccccaaagcagcctcactttttcccttcctccacctccagaacaatgccttcgagcctgctggcatttgagaatgggccgggcgggcagtactgggggcatatggccttgttattttgatggagctcctagtgggatgcaccagccactggccaggtcctggaaataattaagctgagcatattgacctgggggttgcagggccttgggcatgctgcaacctccaacacctgttctcatgctccttctgcagtgaccctctcgtgctctaggcacacctgttagatggaacctgggactttcaaggttgtcactgccagggctggcatgatgtgcttgcactcctgctccctttatggacctgggagttgggaaggtgcattgggttccaagagaagcaggaactgatttggtcttgtagtgaaaatagacctggctctggtttggtaagtgagtgaccttggacttagtttccctagaagcagaaataggataacagtaagtcttcccacttcaaggaatgttataaggatcaagtgagatcatgtgaaattcttaggaaagctgcaagggagtctacctatgaaacacagaggccatgggacacagagggaggagtaagggctcgagctgggcaggcctgggtgtgaattccagtgtttctcttcaggctgtgctgcctagggaaatgtacttacctcttctgagcttttctttgctcttctgtcaaccaagggataatgaagctacactgactggttactcacagtgataacaggagtatctgttatttattaaacgcttatgttgagccaggacctttcttcctttcctttttaaaacctccataaaatgtagccggatttgtaatcacacattacttcacgtggactttggctggtttgtgtagtgtctctgtgagagcaggggttctacgggtattgcccggcgctgtgtttccaaagcccagcatgtgcctggcccacggtgggcgcttaagaaatgttcatgcagtcaagggggtgcagctgcctggcaaggagaacccgggaaattcatttacccttcttattattcagttccttcacctgaactctctcaggctggagctgagctttgggttcataatatataattattctccccagttaaaaatgactaaactgaggtcaggagaggttaagtgctgtgccctagatcactcaactaggaactagggaacaaagccttcttgtacagtacttgtcagagcctccttggaagcttgggaaaagggtgtgggcaggactgggcagggaggaaacagctgagcacctgccggattcaccatctgcccccatgaagatacatggaatcctatctctcataacggcctccagccatgcccattttacagatgagaaactgaggctgagagggagaaagaacccgaagctcagctccagccagagagagttcaggtaaaagaacagaataataagaagggcaaatgaatttccagagttccttcatcccagagtaggatgctcagccttgccaggcagctgcactcagcttcccgccctctctgagcaggggggttggaatgtgtctgcggagggcagcgaggaaggagcctgctggaattccttccctgtggcacatctgggaggggtattccccctggtgatacttgggaaatcatgctggcctcgccagtccttttttccactgttcttttggtctcggagcacccgccaaacatctgacactgttcaggatcgattgcacataaaatgaagaatgggtatttaaaaaacaggtttttttgtgtgtttttccccctgttgtcatctaagaagcaggtttttaggttctttgattctctcccagaataacaaccatatggggcctccacttacactgagcagcctgtgccttgtgccagggactggtttgtttccattgtcagcaaaccttgactggctccaaacattttcacttcaggtggtttctgaaagagggaaagactgaggggaaagtgatgatgtggtccctctgaagagggtttagctttcaagggtatggcaggggtggggtcgacagccagaggggtgtgactttgagaagccaactcaccggcaggatccagcgagatccaggctcggtggctggaacaaagaatgttttgaaccacacggggctctggcatgtttgttgatcgacttatccaaggcctgggccagctgctcttgttccagaagatttcatggattaactccctgggctttggaaaattgtgtcttttttaagaaagggaagttttgaaaagcaaatgctcctgggcaggctgggggtgtggggagtgttggctggagtgggaggtcacattcgccccatggtgggatggccaagggctcccagcgagggaacagttggacctgtggtgtcctggggggagggttcctctgagggaccctaatggacagaggagtgtggacccctgagcctgggagcatcgtgggcatttagaccaaaccacgggaagggctccccaatgctgaaggttgctaggcgctgggggaggttccccgggagactgtggctagaaacaccatctgccaaagatgatttagttccggaagaggcaagggatagaacgagatggtcctttctgtcccagttaatcttggtgctgttcattccgggctgagcattcccttcctgaagtggaatggaagacagactcggccttgggcagactctgagcatcttgtgaaagggagagtcttacctccttggctttgtccccaccccctgcccagggtcggatgtcttgggtgcttgccggctctctgcccactgtcctgccctggcagcaggtaccagcaagcctgtgtgccgtgtgggttacagggagtagcgggcacatgattaaatactcatgctttgtcaaaacactgacagttacaaaatgcctccgcgtctactcagggaagggtgagcaatgaggaaaatgacttcaatatgcaaaagacattccaaggagtccgggagggaatgctcattctagagccaggagggagtcatgggaattagttcttgatttatagaccggctgaaagaaatcacctaggttaaacctgcctaaattctgctatctgtgtatgtgcttaaggggatgggctcaatgaactttgagactgtctcttctctactgatgggagtgacagtgaagttcctgatgaaggaaggtttagggtggaggaattctgagcccctgggttctggattcaaaatcatacacagccctctagataacatagatgtacagtcgtacagtctttgtggagaatttgaaaaacgagaatggtgattatctacttaggacaggtttgggtacagccactcatggaagccaggaaccagcttctaaccatggaagctttgtgttttctgtataagctgtccttgactacggacaaagaatgggtaccgagtgttcagttggcatcataataggaaacagaattctacacagatggttcaacggaacagagtttcttgaggggcatatttatggaggggtaaggagaccagcaagggatattgaggcacccagggctaaacttagagggaagctgtcatcaccctagggcctgaggaggaaggggagaaaatactgtttggggggcctggtgggagctgtagctgggaggaggaccatgagggagaaaccatagtcatggaaggatgttgtcactgccaggaccaagacaccaaggtagggggacatggaaagaaaacaccctgccttctctgtcctcccatctccactctcttattgacactgctcattggccaaaccaacctgaagctggagggccagggagccgggcacctcaagcagtccccatgcaccaagcttccagggcacggggtcagggaacagagggtggaaggggtctaggggagccagcagggagctggagctcatttgtaatatttgtcttgtttagccaactctagaaggctcgtcctgagaaggcgagcttcgaaagctattactgactcttaaagtattccatcgtcaagactagtgtgtttaccttgcaaactaccttgagccagctgtaatgaaattctgaaatgtctcccatacaccctccttctctgtgaaatgtcagctttttgagggcagggcctgattcttttatgagcagttgtcttgaatcacttcaaccctccacacctggagtgccttacactttccagaatgccgtactcagtgacccctcatgtcaatgttttgaggcttttgaattggtcaaggcaaccgtcttgctgagtggcctgagttctccagtgagagaacacgagtagtctctttgagtgggggccacagcactccagacgtggtgatggaaccctctacggtatagagagcccacggccatgccacccagccagacaggaactcaggaggccaggatggaggaagcaggagtggaaggtcattggactccctttctggtttaagcttggccatgggatgtcttaagtagggctcgtggtcctcaaatgtcacctccatcctgatgccacaatgtctgtattgccactattccaattcttcttttgggtgaagtcttactccacctgcggggagagcacatgaaatcattagcaagtgctggcacagacagccattcccctctctggccaggctggaggggctggatggtggtggggggtgtgggtgaagtaagcatgaaaggggagatgaagggtgtctagacactccctttgccgagggctggtggcctgttgcttgctctctaggacaacgtggatctgtttggggtaatggcagacacttttctttcgcatccagctgtctcttcctcttctgagtcccacagggtcctgggcccgataggctctgtcacctccagccagtattgggtagccacctgccactactcaggccgggttggaagggcctgtgaggggtggggtgtgggatccagttcatggcttccagggccaatttgggtgaaattcagttgttcttcgactcctgtgtttctacttcccagtttcattctaaatggaaaacatttctgtaggtttaagtccaaggtgcagccccagagcgggtattttcccttttgagaagtggaggctaccctgagccttgggaaaagtactcagagagaatctcccccatgaggcagtgtagcttaaggagttaggtattctgagtacctccaaaggctgttcgctctttccattccagctcagactgcctgagttcaagtcctggtgttgccacttactagctgggtataagttgtttaacattttagttcctcgataccctaatctataaaatggggatgaaaatagtgtctatggtagggaattagtatgaagattaaacagtttaaattgtgtcaaggccaggcatggtggctcactcttgtaatgccagcatttagggaggccgaggcaggagaattgcttgagcccaggagtttgacaccagcctgggaaacatagtgaaccccatctctacaaaaaaaaaaattagcagagcatggtggtgcatgcctgtagtcccagctacttgggaggctaaggcaggaggattgcctgggcccaggagtttgaggctgcagtgagctgtgatcacaccactgtactccagcctgggtgagagagtgagactgtctaaaaaaaaatgtttaagtgtgtcaagtgcagaaaacagtgcttaatgcatgccatgtgccatgcaaatgtttgctcttatttatttcaagaagcatactcttctgggcagagcatcctcctaggactctggagagatggagcatccgcaaggccaccaacgggactagtatcccccagtgttccccaagcatctcttccatcgagctattgccttgctcacaacccctcagtgagttgcttgtctggagatgcaggccaaatcaatcctgtctacaatctgctgtctggctgtgcccattcctggccacaaaccctctgcttcaccaggaaaatctgtttatgggccccattctcctacttgttttcacctctgccttaccctgcctgaaaagctctccttcctcacctttccctccaaagcctatccattcttcgattccagctccagttctgccctgaaggcttgtccatgcctgtggatcaccatcctctgcctcctgcctcctcctgcttccccggctggtgtctgcctcgtatcatcagtcacctcctcccaagcagcctattgctttctctactgatgccttgagccggaagccagacagcagatattccaaaactgaaaacctgtggatttgcctgtaaatttgctataatttcttaagaacacaagaaaggctgaacttcctggaagttattcctagggccagcatcatgggagtttgacggttggctgtgtagagcagtcactccaaggcagttgatttgctttgttgttcttctcaccccatcagtattataatgtggagcttcctctgcattgtgccgtgagatgacagcaaaagggctgtggccactgcctgggacttgatccttcgctgaaacagggacactttctatgactagtgctacgttacatttatccgttctattggacacatgttcgtaggcccaggatcagaataaaatagctccacagctagaagaaatcagtttataggcaaacaagactctgatgttggcccttaaaaagaaactgctcatattacatattacagtttaattttgtccgcgttagaaggtcccagtgatatctttgcttcttgactgtagtctagtgtttaaaggttatttgcccaggtgacttttttatcttttccaatctaaatacagttgtcccttggtatccacaggtgattggttccaggactccccaaccccttggataccaaaatccttaggtactcaagtcccttgcataaaatgcatagtgttttcatataacctatgcacatcctcttgtgtaccttaaatcatctccaggttacttatactacctaatacggtgtaagtgctatataaatagttcttatgatgtactgttttcatttactggtatgatttttattgtcatattatttttattaaaaattttcttttcaaatattttctatctgtggctggttgaatcaccaagaatgcaaagggccaactgtatcaacagctcaaagtggagagcccagggcccaggcacggatcattaggggaagtacagggctggcagagaagaaactggactcccagagccggctctttctgtgggctgggagctcctccaggctgctgggttaggaccagcaggacggccagaaccatggagacatgctgctggttttggagatggggagaggcatgtgaccttttctgggaatcaaatcagagtgaaaccagaagaagaatctagacttcttggggtaacttggcaaacaaagctcagatagacggaggggtgttcaaggaactttgcacgatttcctatgggctaagagaagacgcttgcaaatctgaaagggcaacatagggaaagttcctacagggaagggagacggtcaaccccctctccctgaccccgggcttggttagggggcagagaacgggagggggtcaaggaggctgtctgtttccctcagtgcaaatgcctggacagcacgtgtgtgcaggctgtgcccctgacctgatgagcacctgatgggtggctgttgaccgactgtccatgcaaggggtgtgggctgtgcttggcagcctccagcaggcagggcttgttcacctgcgtcctgtccagcacgcggcaggagctatcctggcctcagtgttaaaaggtggccctgggtcgaaggagtggcataaggtcccacttgggtgcttgataatgatctagagcctcgtgcccttatcttcacggcctcctcgtttatggcagcaagtcctcgtcctgtgggccccatttctaagctggacgtccagcagttccctcagaaagtgctgtggggcccaggcgtcctctcagaggatatgagcactcccgagtcgttctcactgcgtgtgttcatttcactcactgcctgcttccttcgttcagctccaagtacctgctgatgtttctgagctaggagggcttccttcaggtaataggggaagcatgatctggaaaagggaaggtttccttttgccccatggagagacgtcctgagacacttcatcaaccaggaaggctcccaggcagccactgggttgcagtgaaagttttcagccgctggtgactgctctggtgagacttgtgagagagaacagtgacggtgagcacagcagcccctcagaaagcaaaccagggagtggcttcccgacgtgcacggtttctaattcacacggtccctgcataagctaggcattcctgtatcctgttttcacatgaggaaactgaggcccctggaactcacgtagtttgcccaaggccatctaactaggaggccgtaattagtgaagctgggatttacacctagggctgtctgattccgaagctgggctctttccacggtatggtctgagggtgcagtctagagcggggactgatggggtttgtctgaaggaacatgagatggtggagttccaggctggctggtgtggggccccggctgggatgagacagtgtcttcaagtgtcagggatggacgaatgtccctgtcaggagatgttggtccctggcagccaggcatggtggcagcactcccagcctggcctgccctgcacaaaccttcaggcacacaggcctcttgacagagtgatgattgggattccatgcctgcaccagtggtgggagagatgcaggtgaaacaaggcggaaaggaccgtaattacctcctaacaggtttccacatttctctgctgtcagaatggttttgttttctgatttattttgatctgcttgaaaattagttgtggcagtgtgtttggtgtgtaatcattgtcctgctagctagcagtcatcatcagcaatgttagcccggcaaacgtgatctttctttcctttgcccaatacatgtcaggctctgtgtggcaagggcgagggagaggcatgactatgtgtctctgcctgtctgtggaccccgactcctcaccatcacccaacaggggacagtcctgctggctgtgtcttcccggaaggctcgtgcccgcacagattgtctggtgagcccgccagctgtaccgcatcgctctgtgcatgtgacctagctctctcctggccccctgttccatcccacatgcagcctccgtccactgtcccccagctcgcaacccccacgcagccccacccttgacctgccacctccatctgcacctgcttgtggagcctgtgtcatggaagagaggtggcctgaccactctaagcccacagcaccactggatctttcccctctctctgtgagaagacggccagtctcagattggatttgaccttttcgcttgtggtcgggccaggttgagcaggaaaccatcgttagggcacggaagcataggtgggagaagacagccagcactgtagagtggggagggctcagtgcttccacgggtggatgttcagcagcaggccccctctgttctttggtgaagcttgtctgcagcgagccctcaaaaaacatgggttttgagccagacggaaagtcatcaagcccagttacagtcatcccttggtgtctgtggggagactgattcctggacccctctcagatacaaaacccaaggatgcccatgtccttttatgtatgtagattatatgcacatactacaccattttatgtattttacatatggtatattttattttttaatttgtataattttttaatgatttttttttcctaatattttttacccaaagctggttggatccgcgggtacagagggccaactgtatttcattattcagagcagaaaactgagacctaacacataggcaaggatatgcttaagaactactgttggttggctccaggtctgggatatgaacccgaatctctgttgcagtctgtccaaaagtgggctgagctggtttcaggattggagcagacagctgtccatgtgctggaatttgagggatctgccatttcctccctagaatttctacctttagcattacctttgaagtaagtcagggattaccaaacatcttattaccaaagaactctttcttcccacatgacccaacacagaacagaaaagagcagagatgcttttgttcaagtgcatgggaaagaatggatgattcagagctgacctgttcagcttctcctgattctccagcgaggtcccttatgcttcttgctagaacctttagagctccatggagtatagtgagaaatgtttatggcctctattaccagggcagatgaataggtgcagacgttaacagcttctacaccttaattagcatgggtgtgtttagcagagtaattgagatcagagactaggttgataaaagaatagggttcccaacaggatagtttttgattaaggaaatatttggagcactatggaaatgcttgaaacataggaagggcaagttcagctggagtgcattgggatgacggagggtggggtagcggggtagggtgagaatcagggcagcctggaagctggggcctgaatcactggggcagggaccagggagaccagagagaccagagaaggtctcagacataaactctagctactccataaaactacctggagcatgaaaatcccagcgcctctgccacggcctagactgctcatcacaggggttgcaaagtcacaaaaaagatgatggcattgagctttcctatcaggaactatgtcctcaactaatattaatagctgacatttgcatagcacttcacagttaatataacactctcatatgttaggtgcttctcttaataccccttgaggtagctattgttattgttattattatccttcttttaaaggtgtggaaacacagggtcaggggccccgtgagccattacttggaaacactgtcattaacaattacttcttatagttgtttctagcaactcatgtcctggaaatgtctggtttaattcatctctctctccttctagtagacagacagacagacagacagacagacagacacacacacacacacacacacacacacacacacacacacacacacacacacacacacacacacactgagggctgatagggaagaggacttctcttcttgattctccatagctgtttcccaactgttgctctctaacaaaaaaaccccttcagaaccctcagccctgctcagaaatctaaggaggcttcaggcagcaacagtggggtccaccccaccctgaagggctgctgcaaagatctccaggaggaggcccccaacaccattcctcttgaaggtcccagttcagtgcggcttgagtccttcacctctgagtctcagccaggcaacatccgaaggagctgaggaagccttctctctcctgccttctctacctcacaggagatggctcctgtcctccccatctccctcccaccataaccgctcaccaaaaattgacttgttttctctgatgctgctttattgcatgttaatacttcattactggacctgattctgttacactcgcacagagcaagcagagcagagggtcctgagcatgcggcattagatggagaaactgcctccagtctcactcatcgtgctgagatgggttgcatggcacaccactcttagcacagactgaggctggccaggccacccatgctgggtgctgacaggcctcaagcctgcagtgagggccaatctcagtcctcatgatctgcactggggacagaagccatctgattttaaattccataggaataaaccaatgggtggagtcaccaaatatccagatgttttctcccagctttcatatctgccatttatttttaaagatgttttaatggactaggtacaattttcatacataagattcacccactcagtctattgttctatgaatttttaaaaacagcttatctgaggtataattggcatataacaaactgcacatatttcaactgtatactttggaaagtttcaacattgaccatcagtgcaatcaagagggtgagcatatccatcactcccaaaagtttccttttgcccctttgtaatcccagtagctcagccctcctccccacccctgctatctcttttctgtcatcatagattagtttatattttctattgttttatatcaatgaagtcatacagcatggactctcttgactgccttccttcattcagcataattattttgaggtttacacatgtctctggatgtactgatagcttattcctttttattgcttagttgtgttccattgtatggatatagcacagtttatccatccatgttgagctgtttccagttttgagctatttaaataaagcagctatgaacatttgtgtataaggcttcgtacggatgtatgctttccttttctcttgggtagatacctgggagtggaatggttacatcatgtggtagtgtacgtttagtgttttaagaagttgccaaactcttttccaaagtggttgtgccattttgtgctgccatcagcagtgtatgagagttttggttcttctacatcctcaccaacacctggtgtggtcagtatttttaattttaattttagtcattataatgtgtatgcagtggtatctcattgtgttttaaatttgcattttcctgaagactaacaatattgaacatctttcctgtggttattggccactcgtatattttttggtgaagtatctgttcatatattttgcatacattatatttgggtcattttcatattattgcattatgaggtttctttatatattctggctggctataagttttttttaaaatcagatatgtgctttgcaaatattttatctcagtctgtgtcatcttttctctctcatctttgttggaagtcattttccatatatgtgttggtctatttctagaccatctgttcagttccattgatccatttgtctatttttacaccaataccacactgctttgattactatagctttataataataaggcttaaaatcagatagtgctagttaccccttcatctttgtgatttttcatagttgtttggttattctagaccttctgcatttccatatgaattttaaaatcagtttgcctatttctacaaagaaaagtgtttgcttcatgtatttatttgaaagctctgttaataggtgcatgaacatttaggattgttatgcacccttgaagacttgacctctttgctgttttgaaaagccctttctaatccctagtgatagcctttgcgctgaaatttattttgcctgatattaatatagacagtccagtgtccttttgactgtgttagtatcgtatagttggtcctttgtattctcaggttctgcacatgcaaattgaaaatattggaaaataaaaataaaaaatataacaaaaataatgcaaatgaaaaatacagtatcaactatttacatagcatttatattgtattggtttttataagtaatctagagatgatttaaagcatatggagggatgtggataggttatatgcaaatatcataccattttatataagggacatgagcatctgaggatttgggtatctgtggggcaggaggaggtgtgtcctagaatcaatcccctacagttactgagggacagctgcatatctttttctgttcctttactcttaacctatttgtgtctttatatttacagtggatttctcataagcagcagatagatgggtcttgctcttttattcagcctgacttaattggcatattcaaccaatttgctgttgatgccttgctgtgcttcggtttaacctcttgatactttgctgtgcttcggtttaacctcttgatactttgctgtgcttcggtttaacctcttgagaccttgctgtgcttcggtttaacctcttgagaccttgctgtgcttcggtttaacctcttgataccttgctgtgcttcggtttaacctcttgataccttgctgtgcttcggtttgacctcttgataccttgctgtgcttcggtttgacctcttgataccttgctgtgcttcggtttgacctcttgataccttgctgtgcttcggtttgacctcttgataccttgctgtgcttcggtttaacctcttgataccttgctgtgcttcggtttaacctcttgataccttgctgtgcttcggtttaacctcttgatactttgctgtgcttcggtttaacctcttgagaccttgctgtgcttcggtttaacctcttgataccttgctgtgcttcggtttaacctcttgataccttgctgtgcttcggtttaacctcttgataccttgctgtgcttcggtttaacctcttgataccttgctgtgcttcggtttaacctcttgataccttgctgtgcttcggtttaacctcttgataccttgctgtgcttcggtttaacctcttgataccttgctgtgcttcggtttaacctcttgttgttttctgttagtcccatgtagctttgttcccttttccctctttttctgcctccttttggattaactgagtatttttaaggattcagtttcatctcttctgttgacttattagctaaaatccattgttttgttattttaacagttgctgtagggctcatagtatacatcctttttttattatactttaagttttagggtacatgtgcacaacgtgcaggttagttacatatgtatacatgtgccatgttggtgtgctgcacccagtaactcgtcatttaacatgaggtatatctccaaatgctctccctccccccgcccccaccccacaacaggccttaatcatcgcagtttgtcttcagttgttactaaaccccttcacatatagtacgggaacttcacaatagcacacttagatcactcccttcctggcctttatgccgttgctgccatacatgctaattgtgcatttgttctaaacctcacaatacattgttactatttttgtttaggcagtcaatgatcttttcaatgaaaatcatatatacttaaccatgtcagtaccatttctggtacccttgattcctttatgtagatccacacttctatctcatattattttccttctgcctaaaggacttcctttaacatgtcttgcagtgcaagtctgctaggattaaaatcttttagcttttctatgtctgaagagaagtctttatttttcacttttatttccgaaggatatttttacttagtatagaattctcaggtgatagtttttccttccatgactgtaaagctatgattccactgtcttcttgcttgtgttgtttctaataagaaacctgctgtccctcttgtctgttccactgtacctaaatgtgtctttatgccctggctacttctaacattttctcttgatcactgctttgaggaatttgattatgatgtgccttggtataattcttttttcatgtttctagtgcttggcattccttgagcttctggaacctgtgggtttatatttttaaaattaaaattgataaatttctggctattatttataattttttttttgcttctccccccattcctgtgagaactctaattacacatgtattaggctgcttgacattgtcgaacagatcactggcactttcattttatttaattcttttttttctatgtccttcattttggatagttcctatactatgtgtttatgaatcttctctttttttgccatacataatttgcctgccttcttccctccctcattccttatcttccttcctttagaagaacctagggggatttacctaattttataatgattattatttcagaaccaatccagagcttctgttcccaaagccaaactaccgattggagattctggagggagggaacacagggggtgacattcctggaatttgggggacttcgcaggacttgacattttagaggctggattagggtacatccaatttctcctgcttcctccctcttcttctttcctatccccaaagtaaggagagtcctgtgagcccaaaggcactagacagccctagcacactcttggcagacagggctgaacgcccggatttccctctcaatagggaagacttagggagcctctcacaggagtgagacaggaacagcagctttatggaaactgagttccaagtcaacacccggaagaaaactcaggctcccctgtaggcctggaaagctttgtctgagacaatgaccttaggaggaggtcaccaaaaccactccttccctcacagctcatgggatcagagtcagctgtgcctgctgaatgagtggtcaggtacagcgcacccgcctcctgccagagaaaaggagacctgcagtctggctgcggcaggtctcagcagaatctttagctttcttcaggcttgatcagccacctcaagacctgtgctcatttaaagaacagagagtacatgtaagttaggaatgttctcgacttcaagtaacaggatacttaaggactctgaattggttcagcagctcaagatgccactgagaaccaaggctctttctctctttccacttccttatactaagtctgttggcttttcatattcaagctgatttccttatggttgcaagatggttgtcaatggggctccaggcatcacacccccattcaaggcaggtggaaccaggaaggagtggagccaataacactctggcccttttttttttttttacataaaacagaggctttcccagaagtccctagcatagtacttcttgaatttaatctacacaaggatcccctgggaatcttgttaaaatataggtttggatgtagtagatcttgggtagagcctgaaattccacattttgatcaagctgccagagtgtgtcagtgtggctggaaactgcattttgagtagcaaggtgcaaggctacttctccttactcttagtgacacaatccaattaactagctacaactggctgcaagggaggctgacaaagtatcttacctttttcaggggagactttgggtagcaaaccaatatcagtcacagaattctactgaaaatgcagggtatggaagcatctgaagtcacaaggttgggctggacaaattagagccttcacctccatgagggaagaccatggaccccttactctatatccacactcagcctgcagggacagggcattattgccacgagccagtctgtcctgtatactcactggattagggattccactttcagaattttatcaccttagcacccagcacagtgcccggtacacagcaggtacccaatacgtgtctattacactgaaatgtttattggcacatggtctaaagacagtgccagggaatcctgtgaaaatgcagtgctgattcgggagatccaggatggggatccaagatgatgcatttggaacaagctcccagaggatgctgccgtctggtccgaatcctgggccccactttcaatagaaagggcctaggacatgcagagtaaagtccttcctcctgagttagcagcagctacttgtgcttcattcatgcaggcatgaagctgcttgcaaggatgttagcagatattagatatggctggtggggaggagtaaggagggccttggctatgcctttttccaagatccgggagctggatgctcagagatctcatccctggcttccttgtccactgaaaacaaaacagcagtatacccgggtgaggagagagaccagccaagcacgtctttcaacaactcttaacttgcttggctccagccacgaaacaggaacccgccatccccctagctcgtccctggccctcaggaagtgctgaggctctgccgggctgcatgagtgaggggccgatgtctttcagatgttggggcttcagcgggggagtggggtaagctggggagagggagcatttttttgtgaatattttacccacggaaaaagctgaattctctagaacagacctctagatttttttttttttttttggtagtgggaagtgagttactggaatttcttctgaattcgaagccaaacaaagtttcttgcggttttagttacacaagcggctgctgccaagatggaatgaatgagaagagccactgaaaggaagagacagtgaggggctgggggaggagggtgcagaacaggacccaggcgcagcacagaacagccctccaggcgggcatactgcccgcttctatgctgtcaactctttagggagagagctcactgttctgtctgcctcccaggatcagaattaaaaagaaaaaaggtctgtgaaagtgaggcatacactggcagacacgcacacatgtaaatgattatcattgctttgtaatttaccataattccggcctgtgcactctatggggtcctgctttgttcagtttcctgactgagtggcagttggacgagacacttctgcccctaagctgcaggcaggcggctctcatttcagccttgttccagtgtgagtctgcagggaagggatgcccgctgctccaaggggaagcaaggataattaacttctaccagtgatccccaaacttcattttccttagagcctgaagcctcctccttgttaccttcctggtagccacagaatgggccagggccatgtgtctcctttcatttctccagcctgccctctggtgggcgatgcccttcagtgagcggggcctggggtagggccgttctgcagatcctgggttggcttccagtggtgcctggcatctctcctgctctctgggaggagggacgggccgctaagtgctgacggcagcctgtcactcacaccttgctccctctgtagaaacactctgtttctctccattccatccctgcgtgttacctagcaggaatttcctcttccttgggtcaagcgggtgggaagggctcatgattgctgactgaactcaaccctttacactgggcattcaatgtcatcacattgataacttgaaatgggcagtagtgggaacatttacaccacaaaaactggcatatgctacacccagagctttccttccccctctcctaaaagccagttgctaaaacatttaacaacataccactggctggaaccacttgtgaaggtgacgtagggctgcagggagagcccaggtagtggaggaaatggcagccttccttccttgcccatagcctgtgccggctacaactcaggagcttttggaacttaggagctctgttcttaaactctccttaaacacctcctcatcccagacgggttgactttcaatgagaggactctgctgtgccgcagagctggaatcactcaaagcagagtgatggacgagacttactttcgacgttcctaggctcccttccaccgttccctggtctccaaaccccatgttcttatctgacggtatttctactctttttctcaacctgttgctaacgtgctcattcgagagaggctggtgcgcacctacccagcggctttttgggcggcagtggaagggagtgttttattaggaatttacgttatatgtgcaaggaataccacatggatggtaaagttcagccgttttccactgaagatagggattcttcaaactgcacagcttttcaggccatttcgtttaggcgagccctcatgttatagtcagggagtttgaggcccagggacatttcccaggggatgaactctaactaaaaatgaaggtctcctagtcctgtcgcctgttttcttcactcagctgtttaaagggatgttgcctcgtgtgaattatggatgactgccagagttattagaatgaacagagttaccaagagctaaatactcgtcatttatacctggccggttctgttttcagttgtcctttttctttgcaaagagctttgaaacaagactggcctgcttgaccttccatttagagttaatgtcaaagcttgctgaggcctgggaaacaggtttggttgtttgcattaaaagggagtaggaagcaagaaccttaattatcctaggctctggcctatttaataaggaatttgagaagatgtcttagtggctagtattcctagaacataatacttgaaagtggagcgagcgggtgaaaatatgccttaggcaggaagccagataggaagggccagtgtctacaggctctgcacagtaaggaccctgtgggaagatgtcacaggtaacagggcctgatggcccagcacccagctgctttgcagtagttctggcttcggggcttctctgggtggctgaagaacaggtctgtgaggttcattcgggggctcttgttgatcaagtgtggatggtgtgccggacacagggctggggctgcagagtggaggaggcgcagtccctcccccgagagcactgtggccagtggaaggagacaaacaagaaacaatgacaggacccaggctcaggctgtcatgagcagccctcctctggagagtgggaaatgtgcgttgggaactcatgcttacaacttttatgttttttcttactgagcaatgctcataacaggagaaaggatttcttcactgtcccaaaagaatgtgcctcaggactgaaattggtagtggccctcccttactcatgtgccccaagcacattggaacgccagaggaattttaagcagatttttattcttgttttctggaggcaaaatctaaagtgaagggtgtgtgtggagaggtcatgcaagaaatttggaagctgtgtgccttgtctggctgactgtcccaattaccccgggcccagaggtgggaggtcccacaggggcctgcccccagttgacagagggctctttaccgttaggaccccttctgggtttctcaaattatggcttttcctccttcatggtctcctggtacttttaaccccttctctccatttttcccaaggaatattctagaggaagggtttctgggaatgaccttcccaaggggagggatcgggcaagtattgagtcattcctgctcgtctggattgtgattgcgacccgtgcctcatggagtgtcgctggatacgcgatcagtgtcccttgaggcagtgctgcacatggtgcagttccagagaaatgagggaatgagaatgaacgtggctgctcgtgtgttccgtggctgtttaggaaggttgggtcagtggagatcagggcccgaagagcagtttcagcctgcgtggtcttgatgtggtcttggctgatgagaagctccctccaattctgtgattctgggtaaagcagaccatgtgccatcgggagtgctcctgtgattctttaagttagtaattctcatccctggccacacataagaatcatctgggatcatttaacaaaaaacaatgccaggatcctacagtctactccacgcccttcattttcaaacttgagtgggcaccagaatcacctggaggatttgtgtaaacacagattcctgggctccagcttccgagtttcagtggctccaggatggagcttgagaatttgcatttctaacaagctcccaggtgactcgctgctgctggcctgggaccacactttggaaatcacgattatgaacaggaatcagaatttctgaagatgtggcctgggcatctgaattttttcacattctccaggtgattttaacatatagctctggctgaaaacgatttctgatcattgatttttttttttttttgcatcatccaataactattcattggtcagactgtgtgctaggcactgagttagagttgaagaccctcaagaattccactgacaactgaatcatcaaagggaaccgagccctgcccaaggacatacagttgttttcctcttccttgtcctttggagaagcacagctgaagcttcctgcccacaccccagcccctcctccttgagcatgaatgtgcagtaagtatgagagcctgtcatttaccctccctggcctccctctccagccagcttctctctgaggagtgaggatttcttgctaagtacatgatgatggcctgtttactttgctctggagtttgaggctcttgcgcagattctgccttcctggacagttcaggaaccaatcaaccagctggccttggcaacctagaaagcatggtcagttgccctgaaataggttgattgcaccccagaagtgcttttccgcctctccccatcaaaggtgtttgcaaccccattttccctctgagtcagcttgtccattaatgggtttgtgttccttgatggggtctgtttttccagggtcttgaggagtggccctttccacccagtttggctgcggggctgagaaggtgcccttgcattttgtattgtgtgtccgtggtgggtctgtgcctcccttctgtctgttttccctcaggaccacccaccgccccatgcttgtatctacaacagctatgaggaagaacatacagattaatcaccctgctgcgggatgccagctacccagtggctctggcagccccagtcaatggatcctgcagtgtagccttcatcagtagagctgccactgccagcacccaaaaggtagcactaatatgcatgtgtgacctgaaaattacaatgtaaatggtggggcaacacatgtataggaaggtaaattttaattaaaagtctgttctccaactcagcctgcctttaaagatacagaaatgccaagctgtcaggctgccggtcgggttaagagggttctctcgtgcactgtggaccaagctgggagaactagggcttcattgaaatcggatgcctttgactaattatgcaccaaatgcatcccatatggggaagatatgccctcaggtggttagcagagccagcaggagccaagcttcctgaaaaatgctgggtcttctctcctgcagtgtcagggggtgcagacagtacagagggagggtatgagagtcgaggcacatgccaaaaaggagcaggtgggaaaaaagagcccatggcccagcagcaaattgtgtgtctttgagtggatgtggcttttgaggcactatgcccaatagtcatcctgaatttccttcactgcctggggagggggtggatggaggagggaaactagccacctccagaggcaaccctgctggacaaaactcacttttagaaccatcagaagcccattttcctgtggaaatctacggggaagagatagagaagagctgcagagtctattaaatgtgtgcttgctgcctggtctccggtatagtcaggaaatcagatttgtacagtggaaattcattcatgccacaaatatttattgagtgcctacactgtgctggtggtactagggactggggatacagcggtgggtgagataaaggcacgacgccctcaccgagacttgtgtgccactggagaacatggattaaaccaggcgttacgtgatcagtgtatcagtgccatatgggcaatgatccaagctgccgatgggtacacaccggggacacctagttcttaagtgactttttaggatcccaagtggtcagaacagcttccctattttgccatttacatgttcacattcacttagctcaagttacccttctgataagaggaaattcgcgtcaagtcacatagaatcactgaatatttgcacttggaggatcacctggcctaattcttctgctttacacatgcagatgctgaaggagagaagttaaagaacctgtccaaaatcgcacagctagttagtaataaagcttgggtggaattctgcttttctgactcccagattagtatttctttgactttacctcccctttggaaaaatgaagcgattcaggggaagttcctgggcatttatggccaaactgccctcgctctgaagattcaatgttttaattggcccggcagagctggagtccacaggtggtaagcatggacaggtggagagccagcatcagagagagcctcctggccagcgcctgccttgcttcacagatgtcaaggcaattggggattgggggcagggtatgataaagggcatcaggaaagtggcagtgctggggcactgtcctctgggcctccctgggctcagctgggcaggggcgtgttttcagagacaatggtgttgactccctctgggcagccctgcagggtggcagtcccacaacagaaatcttggagcagatatgttggaggatatgtataagaatgagggattagtgctggttgggggcagaaaaaatgccctcttggggagaaagaaatgatctgtgacaaaggacttcctttcctaaccaggcagactctggaagatgaccacgaggctgggtgggaaggtggcagtggaaacgtgattaattgtactgtccatggacagtgagccgaggagcttgtacctggctttattagagacatacactcggggctgctctacccagaatccctcctgctgcctccagggctgctccactctgtgtcttagagatgagaaaaggagtcaaggactcctaccagcgtggaatggtaacctctggaggggaggtaggtctcccagggatctgagacgtgttccaggaatggaattcccagtatccttggcagtcatttcaggatcttggggacctagggatgctgtctggactgctctaaaatagcccttctgtggcttcctcaaatgtattgtctgaatcagcagcttcaaagtgatatcagggggtttacagcatggatgttggagctatgtagactggattcaaatccccagttctaccaattccagctctgtgtgcagggcactagaacttgctgagtcctagctcctttgtaatatgaggtgatggtgaatatgtcgtagggttgttgcctggattgaaagtaggtaaagcacctactagcgtgtctggcacctgggaggtacttaaatggtaacccttattacaacaaaacaataaaaggtccttccttttaagccagaaaagttatttggaaatggaacagtcttttaatgacggggacttaaaatcccaaaccaccagccaaaacaatcaaaatggaacccagacggatatttgctcaagggcccctggcttctcaagggcctactccgccgcagaatttgcctgcaccacctactggtggtttcttagaactacacactctctttctcgactgctctttggtgagcaggacaccaggagaggcagggaggaaaggaaggtaactagtagttttgcaactgttttaattacttcaaattgagatgtttgtaaataagatgttagagtctggagcttttgttcggtcttgtgtttagcgtaaatatagttttattgaaactcgtcacagaagtaccctgcagtggagggcgcaggatttggctgtgacggagcagagctagaggccacttgcaaatggcagcgtttggaagtgcctgttctgggtagagcatccaggctgcttttgattggctgtttgtccctcccacgaagcaagaaaggtgaatgtaaccagcccactggaatcggtccttttgccattaacgtcacctctgtttactacgtgggaagagtgattcacatgcaggaagaagaccttttccagaaatcctccatcagctagaagaagagagagatcctaattagggagccatgccacatttcattctgagattttgtttggaagcatttttccaactgagaaggtaggaaagggtcgtttaagtttcccactgttctgttgggcttaatgacctgcccaggtctcaggctgctctgagctgagctgtcagtgagaccagcaggaggacatcactaggactggaaatagcgtggagtcaattgacagacagccatgaagcactactaagtgccaggccttgtgctggctcccggggaggcaaagaaacatagaacatgaccttggtccttaagaggttgagagtttagtagacaagagaagcctgtgctaaatctgtgtacaatagtgagtgaagcaagtgctgagtcctagtggacaggtccatcctcttgtggaatattggagaaggaagcatgcatgtgttcagttagacacagtttctgacctccaaggtgaaggttcaattccatgcacgtttattgtgtcccattttgtataaacagagcacgtttgttgatattctgaggtatttggagaaggacacagttgagtaccatttttcagccctttcacattgtgcagtacagaggtcaggagcactgtttcaggaatcagacagcccacgtttgaaacctccaggacttaccacctgtatgtccttggtcaagttatcaaacctctctacagcttcatgtatccaatcaacagacgtttactaaatactgtaccggcactggcaggcaggctagagggactgaagggatgtgcagaggttggtggagagggtgagcagggcagagactgagtgtgtctaaggaaagctgccagctttaggcggcctggggagcttctagttctcagccaatctcttccctgaatgggcagcctatgggtgaaggtccaagtggggatgtggctgtagtgtctcttcctgcctttctcccatgccctgcggcaccaggcccacactggagtgctggtgggagcctgcatgcctggttaaaggggcatgccagagagctttccgtaattgcgtcctttctttttttttttttctggtgtatttatgagttttaaaagccccttggcaacccaggaaattccatttccctctgcagctcatttataccttccttgatatatgcccaggcacaaacacttgtgtgtattatttggttgttcacggggaatcttgtaaaatctgaggccttagtgggtgcacttcaggcttgagggcaggagagggaaaggagcagaaggtgagaaggtaacctctggcaaggaaacggtaacacttttaaatctcctctgaagaccaaaagcaaaagaaatgggctcaacctgtagcataagtgtgctagaatagacacaagcaagtttttcctgatagatgtcaaatgcctttttgcctgttcacaataagcttttatacatatggccaattctcatctgactgggacaagatgcagggagtggaataaactaaatgtccagtgtgcgtaattggtgttgctataattaatatttttcagccctgtgactccatgaatgcctctaacacctagagcaggcttgtccatcccatgggccactggccacacgtggtccaggatggctttgaatgtggcccaacacaaatgcataaactttcataaaacagtatgagatttttcttgcatttatttttagctcaccagctatcactagtgttagtgtattttatgtatggcccaagacaattcttctccttccaatgtggcccagggaagccaaaagattgggcatccctggtctagagccttccacagtttgacctttagagtatcttgctttggcttattctttttcatatgtatgtacttcattttccaaaccatattatactcttatcatttttatttgtatccctaccacggcctaaaatagtgcctgaatatagtagacaataagtgtttgatgagtgactaatagataacagcagcttccagtgtctgccagtgcttacactataatttatcatttttttcttaaggtgacagagaactcttgtaataactctaatagcaagtcttcttttgtgctaatatattaattgaatcatttattaactttctaataatatgcaccagccactgtcaggcactagttattcaaaggaagacgagacacaaccctgaccagacatgaggggtgtttaccatccacctgggagatgggcatataatttaaaatgaaatatcgattggtaatatattaatgaagagtatatattcataatttaggacagaggaagtgctttttgcctggccttaaaggggagagtttcggggaggatgtatttgagcttcatcttaaagacgagcaggagtcagcgagaagacatggcagcggtggtgggtcctggcagaaggaagagcgtggcccatagcatgaggcacgggtacggttgtgcttggggagccctgaagaggcggctgctgaggaaggtggagctggaaacgtagattggagtcaaagcacgaaggccttgaataccctgggcagaagctgagcaggcagtcagaaaggccctgaggagactcggaagggtcacctggggcagtggagagtgaggggcgggggaggctggccaggaaccatcgcggtaggcctgatgtggtgggggaaagattcctcttgtgcgtgctgtcgggatacatcatggagcctgaagcatgccaagaaaccaagcaagggagcgtggcctcaggcttgccatccgagccatccaagccagaggaacccaagtacagctgcgggtgaaatggctttgttagttaatatgtaacatgtcgcctcaatattgagcatctctggcagccgctgggactgcgggcgcgttgttggtcacactgacccagacaagtagtcaaggcagctttcaccacagatcaagcaagagagttggcagtaggtggggcagggtggtctccgtctgtgtgcacatggtgctcagtgagtcacatctgctccagttgtgtaatctccgtggtcagtgaagcaatgctgtgcgcacagttctgtgttgtgcctctcccggggaaggggtgtatttggcctgtgccccaccctagccctccttcgtcttccctctttcaccacgtcttccggggctggcttgagtgtgggagtctttctgccagctccctgcctacagccgcccactcaccagcccttcatgtgtgcctctgagagtcttcttcctaaaccaccccgtgcccttcagtccccttgtgaagcctgggcagtgaacatccttaagcccttagcagcttccctgaatccactcctcgttatccttcaggagtcctcccatatggtcaagcagatgaattccttgtttcttattcatgtcatgccgcttctcacctctggcaaccccaactaacatgcccctccctcttttgtctttcaaggtttcattcaaaccaaacttccttcttgaagccttctgcaaccccatgcctctcagtgaaacgtccttccttactgtgcacatgagccctgtggcacgtgacaactgtgcctggataccccaatttctctttctaaggcagggaattttcttgtacttcctttagtcccagtacctagcagaattctaaaaaacagccattcagtgaatgtgtattgatatcaatgattctggcacagctgacggggccaaataaatgctaagtagtattaagagtgataatggtttttaagtaataacaatacctaccatttattcattgcaatgggttggtcacagtgctagacccgttacaaccatcatatgattgaatacagcgtaaccaacctgtgtcttggcattacttccattttgcaggtaagaagtgacataccttgaccaaggtcatgtggctagtaagtggcaaatgtggaagtgggccagtgttctgcttcttggcccacactcccaacctctcaacatgtgtcctctgccatagctgcatctcccagatcgcatgggattttttcattgttttgtttttgtgaccacgttgcttccttatccctgtgattgggttttgcccatgtctctcctatgagagcagccttggtaagaagcagggagaatggaagggatatcacatgccagaatggtcagaaaaatgaggttgctcagcaggtgtcataagaacggatgattcatgcactgtgccttagagtaaagatggagaaatgcaaagggagtggggagcagagagacgctgacagatgatgagtgagcacaaatgtttatccatgctaatggagtggggacgtgatagtcactctgttctaatgcttatgaggagcagtctgtgggctgcaaatgcaggagcacaaggaatcttcaccctagtggcaggggaacctaaaactccaggctgcaaacagtggctggagcatctctgtaacagtctggccttgcagatccaaaagacaggtcatagacaacaaagacatctgatatttcctgacactgccatcctctgggctctgggggagtccaagatcatttgcagcactgccctgggagtggtgacaggctggaggaaaattactggggtctgaaggagtgcaggcccagctttcctcttgcttctaaggccaacccaaacaaataattggtgctgctttcagaatatcctcacatgggaccaccaccacctccactaggctctctgtccccagccttctgccttaggcttttccacctcacactacactatctaaattctctaccgtagagccaaggagtgaggataagggaaagggaagccaggggttctaagggaaccaaagtagtaccaaattcccccgttggtctgtggtctaacagtacggaaatggatagccatctgcatggggtggaaatgtctcttctttgtaaatgttccactgcctgagatttcaccattctagctttactttgcttccattattccacagtttccaggggaagagaaaactttacctggctaacaccttgatcagaatcacttcatcacagatcatatacatccacagagatgactgaggaaacagagaagagcttagaaagccaactctgtcttcatcaccttttggtcttggtcctcctgccttgggggtataaccctctcttagtttgtgggagaaaaatatccatggtaagaagaaagatgtcaggtccaggacagcaaagaaaccgctcagtaatagaagcaactccgattgcatgagcaggcttctcgagtgctgtcctgtcagcctaccgtccacattcctggtgtcatcaactctctagggacaggagcacagaacacgtgggagccgtcactgcaggagctgtgttagtgacagcagcattcaccagaggcatttaaaggctgattgttttatccatagcattgtctgggctttgagagagaaatcctgcctgcaacaggagaagactgaaaaatagaaaaccattggcagtatcaaagggttgtcattagtggacaagtacactggcttgattcactagtgctgttattatggttgttattttaatttgtcaagagacaatgggttgttggagaacatgggcagtggcccttgcttccaaggaggaaaggcaaagggaagagagatgctagggggtcgtttctgtagaaagcagacgcccaggtgtgtattttccccaccactgctgagccccacagcatggcttgtgaattttacaagtgatactgtgacatcgaaagcattccattgcgtctttgtgagaatctagggtcctcttttatgcttagtctaagtatctacagataaacatgcatctatattatatatgtgtgtgtttctccatactctgtgcatatacttaagtctgtaatgtgcatatacgtgtatctgtctgaacagttggatatatatagatgtgttgcagctctccaacctttaccaaagaaacaaaaaaaaacctaaaaccacacacacacacacgtgtgcacatgcaaataaataaatagagaaggagaaggaagaaaagaaaacagccagaggaggttgctttttctgtttcagaggacctcagcagttcttcccaaaatagacttctgtccttgctgggtaacatctaaaggagacgacatcacagagggtccaggcaagggctgtggagtccgacagtggggttcaaatactcacatgtgctgttgtgcttggtgcggcaactcaacttctcaaagcctcagtttccccatctgaggaagagggacagtccttcctgggaagagcaccctgccctccccatgacaagtgctcagcaatagtctcagccttctttcacaaggaacacaattgctcatcctatagttacagctcaagtttacaacgcaagcatctctcaggtgacagggtctttttttttagacagagtctcgctctgttgccaggctggagtgcagtggcacaatctcggctcaccgcaacctctgcctccaggattcaagcgattcttgtgccttagcctcccaagtagctgggattacaggcacgcaccaccacactcagctaatttttgtatttttagtagagacaggattttaccatgttggccaagatggtctccatctcctgaccttgtgatctgcccgcctcggcctcccagagtgctgggattacaggcatgagccaccgtgcctggccaggtgacagggtcttaacatggaggctttcaggacagatttggtttatgtctgccctggcattcagaaggtgacaagtggagcccggaaggctttcggactaacttctgtaggcccgtgccctctatggccgcagaattggcttcttgttccatgttgctgctagtgctttttgtggccccagccaagtcggttcctatctttggaccacagtggacccatcgaggggctctctggagtcctcccagcccacccttctgtgcctggccactccaatcttgcaggacactgtgctggaaactgacttcaagagtaacactgttgtggctcccacctccggggacttcataggtttgagtatgtgtgtgggaatgtggtctgttttatttactcttgctaatgaggctgaacggagctagtgagggcattaaaacattttagtgttattagttttaaaattagcccgagctgttaaggagagtccctgctcactttgcttatgtgagaaaggggcttctgaatgccaaggttgaatgcccagtgtctttcatcctaaaaaagacaactttatgcgctatgcgttagaatgaacagggaaactttaaatataatgatatggggtgcctgggccccacctcctcctttgcttcactggccctccctggacatcagggggtgtggtttttgcttttttgttttttaagttttccaagtggttctcgtgcagccaaggttgaggcccaccgggctaaactaaaaacgttttccggtgtatgtgggaggcaggtaggagggagggctggcgtgctgcccagctgtgtaccatttcctgcttggtggatgctcagggagtgtttgccagagagctctcatcggatgcttggcatggctagttcagatgctatggacagaggggttcctgtgggaccagtgcttctcagtcctgaaatcatgatcagaatccccccatgatctttgagaaaatacagattcctaggcctcatccacattggccggaacagaacctctgagggtaggaatgaagaatctgttattcctgttattcttaggaatagtgaagcttcccagaagatgcttttgattcagaaaccaccgaaaggggaaaacttgatcctcaattcctaggagtgaagattttacattttccttttggtcatctgatggccctagggttcactagataggccacttactcaccatgtgacccggacaaggcattcagcctctctaagcctcaatgtcatcatttgtaaaatgagagccataatggtttctgcttcctaagagtgtttcgaggattaaatgaggtaatatgcgtgtttggcacattgtagatactcagtgtgttcactgccatcatcatcatcagcactatcattttgtaactcagatagaagctacacactgtaagagcaatttctaagatttaaagagaatgaagtaaaaaattctggctgtgaagtctgaggcaaatctagaggctagtgggggtaaattggttttaaacttgtatctgaaccagaagcttctctggagagagttggagtaagatcacacaggtaatcctcaagacctgtttgttaagagtacaaagccataattgggaaaacagtgaggtcccgattgtcatccagaatgaattaatttacatgcacttatggagtgcctcctgtttgctcagctttgtgcttggtggcatcacatataaaaaggaccaggccgggcacggcgggcggctcatgcctgtaatcccagcactttggaaggctgattgcaggtggatcacttgaatctaggagtttgagaccagcctgggcaacatggtgaaatcctgtctctactaaaaataaaaaaaaaaaattagctgggcgtggtggcatgcacctgttgttctagctacttgggaggctgaggtgggagaatgacctgagcctggaaagtggaggctgcaatgagctgtgatcgcaccactgcactccagcctggtgacagagtgagaccttctctaaaaaaataataataatacatgaaaaggactggattcctttctttcagggaattggccgtctggtctgggaagtacaattagctccctttgaagaacaggagcaggacgagaggatgtgtaattaagtgctaaattgtgtcactaggactctccagggctagatgattcaaggatggcaacacaatgagccatggaggtggctgggggagcctgttgggagagtagggagggatctggagcaggaaactacaagcaaatccaaagagatatccaaggagggtcctgggacaagagtgacggctgagatggggatgacgagcagctgccctacctggatggaaggtgagggtccctgttgtcctggagctgcacagccacttataactggggtcatctgggtctgtggccccctgacagctggtggtagtctgcaggcatacactccgtgtcctgtcgtgagccggtcctcagggcggcatctgcccaggaagccacaggcacacttagcacggcccaagagcactatctgcaggaggcgcttggccccagggctgagctgatggtggttgggtggggtgtaggcgacaggagagcaggtggcctccttcctctgtgccatcgcttagagggtatcggtagaaccctctgtcccagaagtcagctccgtatctgtgggtcttaaaaaccttctgatcctgtaaaatgacatttacaagaatgattagaccttaaattctgtgatcaggcaaggtcttaatttggggccagcagtttagcacagaggcagggcagaatttcgcacagaaggtacctgatccgtgatttgccccggaggtgaaaatgagcaaggttctgttagttaaatgagcataagaaatgcagcagcctcatccgccccccgccaccccaccagagagtcacaaagacgctcattggcattttaaaggctcagagaagtcctgcagaagaagtcctctttagagccctatgtggcctgcaaactgtcttgaccacagtacccttctcacatagtccctgtgaatgttctgggcgacctgtgacccagcctgatctcctttggaaaaaactggagtgatgaggtcctgccagactgagcctgaaggagccttccatctgcctgttcattttccaagccccagactctgaaaggagattcccaagttccccagcctggccctgcagtggtggggagcctcagatcccaggtctggtttaatgttccttagttgttaaccagctggaattaaggctgagaggagactcgtgggcaggctttgcaattgaatgaactatcagtgtggttgcgaggctattttgaagacattttagattgtttctggttcagtaatcttacaaaaagtatgatccaactgatttattaggaaacaatttgtaaactttggttcacttacaagaaagaagtgtttgggtttttgaaaaagatactgcttttgaggctggctgattttcgtgactgactagtgtttatgaactgaaatctggctgcctctgccactcagtgagcctcgcacagtgaattcctagcctgaggcctcattcttgctattaacccattcgccattctctcccactgctgggactttcggatggaggatgcctggcctgtgtgttggcaggagcagaggctgacgtcaggaacataaggtcatgccataattgctgtgccccctgccacccccgccgcctctgcttgctagtgccaggctgcccaagtgctgagaatgccaaggtcactcttccaaaggaggcaggaggcagccgtagcgtcagtcccttgcctcgtccatactgcccatcttcttccaaaggcaccaattattggaagttcctccccttgtggctctggcctctgggacgcctggggacatttccactttgctgggaggggagtgtcctccgggcccctcggatgctccaccagtgagccagggcttgggatgggtagcgtgccaacagggagtggccacttacctttgctcctgtatgtgccctgtccttagaggggtttaaatacatcaatagcttattcgccaaaatgtatccagaactatttttagtgctttgaacatgttgactcttacataacattcattcagtatatataaactattcagtaaatattccctcatgagaagaatggtattttggtctattttgtctctctgccctctgtgttctaatttgggaccagggagcctctcggctccatcctggggttggccgctcccagacctcactcctgctttggctgggcttgctgccttggccatggtgaggggctcttgcggccccgggaggggggcctggtaaatgcagagcctgcatcacagcaacaagtggggagcccaagagcagggtgcagagctcctccttctcccaggacggaggcgggaaaccggccgtgggagcttccctggtcgggaccatgttcccagtccagagggatgtggttgcatgctggagccgctagtatggactcgtgaatgtggcttccggtcacaaaagtgccttccaggtgggaaaatgagtgaggaaacctggattcatttgctgaggtgctgtggcagagcactgcagactgggtggcttgcacaagagaaacaggtttcttctcaggcgggaggctggaggctggagatctgagatcaaggtggtgcagggttgccttctccctggcttctccatgggtcctcacatggtatccctctgtgcgtccgtgttcacacttcccctttctacaaagacgccattcatgttggataggatccgccctcatgccctcattttaacttaacctcttttaataccctacccctaggccagtgcagtggctcacacccgtaaccccagcacttttggaggctgagatgggaggatcacttgagaccaggagttcgcgaccagcccgggtaacacagggagaccctgtctgtacaaaaaaaaacaaacaaaatagtatgctacctctaaataccatcacacattctgaggtgctaggggtgagggctttcgcacatgagctttggtggggacacattcagcccatagctgaatgtccatgcttctgtctaacgggcaaggctgctctgcaaggctgtgcggagtgggcgccgggtggaactccaggggaggcacctcagtctgatgtccaaggaggccccctgtggacgggcctggcccagaaaacctgtgtgtttcccacaggtttggggagatgagttgttctggggtagagacaggtcttgtttgactttgcaccccagttcgtatctgcacatggtgagcgctggcttggcgtctggtgtggagtggtggagagagattgtggaggcacttcttgcagatggcccctgcctctttcctggtgagatgtgggcttttcttaagaaagctgcaacatgtgccccaggagatacttgggctcccttgcccggggtgcacaggacggagcagggaccatttgctgtgtcttctgtcagatctctgagggatgtccctcaggggctgtgaactctggtggaaagtgaaaaagtcccagggtggattccagtgggctgccagccgggcgtgtgtgtgaggcgaggtggagggcttgaggaggtgcacggccccagaagaaagctggagggcggtccagcctaggacacgctttgggcttgcagttcctttccttccttcagggtcaggcttcaccaagcaagccaagggtccctctcacagcagcgacagcagcaacataaatagcactgatatccaacccggcaccgaggcagatcccctaccaccagcttgttctgagagcgtgaaatcacctccatcctgacacgtttgtccccctgtgcttttgctgtgccacctcccgagcagggctggattaactggataaagctggaagagtaagtgccagctccatgacctggccccagggcaggcagcccctgcctcctcctctctgtaaaggcacagagagcgggttgctccaccggccacaaagcacattcccaggaggctctgggcacatccaggcctccttgagggccagccctctgcaccacacaggtagatcccttcctgctaggacagccagttgtttctaaatttaaaaaatgctccttgcatccaaatgcaagagctaaggtgaggtttgctgggcatcaacacctgggcacaaagaacaggtctcaggcagggcaggcagggtgagcagagggtttgggtgagaaaagccgccatgcccgggggctttatgtttttacagagctttcatttctaatgtgacgttaaattcttccctagttgaacacttctcttggtggctggctggcagctgtgtgcgggtgtttgcaggatgataactgcctcagcatccatgccatcctgagctgctgggaggactgctgggcagagactccttggcaggggctctgggaggcatctgaatatccatcttccctgatctcctgtcctgcacacagatgcacacactgcagggctatttctttattcagtttggttttgcttttgccccctagccctccctgtgcccagtacctgggtctaggaacatagaatttaaaagctggggcagattctgagagctcttatttcagtctcatcactttacttgggaggaagctgaggaccagagatgttgagacatgttcttaggacaaagcaaagtttatggtgcagcctcaggtggagcccaggtcccctggctcccagcctggtgctccttcccctggatgacagcatatctgtccttctgttgatttgtcctacctggggtgttttccccatcctcatgtccttcttcagctggacatatttgtggaggtccagacacaactcagtctgggtcatttcttccccacccctcaaaaaacaggttgctcaaggcagatgcagagggtatgcctgtagtcccagctctttgggaggctgaggtgggaggatcacttgagaacaggaattagagaccagcctaggcaacatagtgagaccccattgcttaaaaaatttaaaaattagctggccatggtggtgcatgcctataatcccagctactcagaaggctgaggccagaggatcacttgaacctagaaagtggaggctgcagtgagctgtgattgcaccactgcatgccaccctgggtgacatagcaagactttgtctcttaaaaacaaaacccagattactagtgaggccaaattgtgatataaggtttgtaatagagacacttttttaaggctgaccatgtgccaggccctatttaaatatattactcatattagctcatgtaatcctcatatcgaccttctccactttacagttgaagaaacgaaggcaccaagaggtaaggaacttgccagaagttatgcagctgagggtagtggagccaggatttgagcccaggcagcctcactgcagtccttgagttcctaacctcagatgcctctcctctgaggggagccctgctgtgctgctcatcctgttgagtgacagcctgctaggatgtgaaggggacattggatacttccggaagctgtggtttgactgtgcagatggttgtttctcaggctctggtccatggtgggaagcagtgagtgagcagatcagcccaccttcagcctgtgcgctctgccgtctgacaccttccaccctcagggcctgatcacaggccagcaggcagctgggggccctcttgggtcctctgtcttctcctgagatctctcagagacagcagagaaacgagagaccctggaaatgcctcatagctagtttgaatcctagcacttacacagtcataaagttaagtccttgtggtcttttatcctgtagaatagaaaattaaagggaaaaggtcctaaaaagaattcctcctctgcctgtcccgtcttgcccaaatcctcagaatgtcaatctttccccaaactctgcacactcttcaagcacttcagaaactaatactttggtatatcccaaattgactttcaaagaacgctggataaaattttcttgtaaaaagggtatgttagtcaaaaaaagtttgagacacactggcttaaagtcacgctaaacaagttgatgtgccacaggatttctcaggatctttgatatgcaaatgtccttgggaggcagagctaatccgcagtttggtagaagctgagccccttcccctccatctcacatacaaatgaggaagtgttttcaaggcctgtttgcactgccagtggctgtcatagcaaactagtagcgtccattggctgtcaggaattatgctgttggcacttccccagccccgtgactagccttagaggaaatcaggacccccctcaccaaaaccagagcccactcttagccacctgccatggtctcagctgaagccatgaggcacccctgccagccagttcttcacacctcttcttgggcctgctgttgacttccctcctgtcagctcctgggttgtacccttgggatgtgcaaagctgcaaatctgacctggacgttaggtcattggcccagaggactcagagttgtgttctttggtcctctgggatccagtagggcttcctgcttcactttcatctgctttctctacccagggtctgagaaaagtttctttggcaaaagcatttcattgccaaaaagaaaatctgaaagctgctgatgtagtttaacctcctttatttaacagttgaggcaaattaaggctccaagatgctgagacctgtacaggatcacacagctccttggaagcagctgagccaggactagcacccagctccctgcttcccagtactcatggtctttcggctgcatagctctacttctctgcaaagggtgctggggccgagattcatggcctttaactatggttcttaaatgttactgtgccgcagacccacccagggcactttgtaaaaattacagaatcatccatcttgaagggccagggtcttgggaaagttgcttcatcttttgaggctctagatggagtgttctttctgcgctgctgaacctggagcactgagaagcttttcctgctctcaggtgcatttgaatttgcatggtctgttttacagggcaggaggtgcaaattcctattgcttaagcccacttacataacaaactggccacaccttcaattccaaaaggcaatgcggctgcccactattgcagactatgaaaagtaaggtagaaacaaactctgggagccacagaggctactcttcatggacttatttaaaaggaagacctctggctctttccccagagattatgatttaggaggtctggggtggaagacaagaatctgcattttaaccagcacaccctcttcccacctccacccatgtggttttgatgcagttcatccttggactacacttggagaaatactgacttacatagtaaagaaccaaaactgtgtaattataggaatcactcaaacacccacatgctaggatatgaggctagaaattcaggtttatgattgtccaagtgggttagagaaagaagcaaggcatcttgatttttaatgtggataacatgtagcacaatgatatcatcctgataatctttttaaaattttttttgttattgagatgtatgaatatattatatattttggatattaaccccttatcagatatatggcttgcaaatattttcttacatttaaatctttaatccattttgagttgatttttgtttatggtgtgagataagggttcaacagccagttttctcagcaccatttattgatgagactatcctttctccattgtgtattcttagcacccttgtcaaagattagttaaccatatatgcatgggtttatttctatggtctctattctgtcattggtctatgtgtcttgtttttgtgccagtaccataccattttgattactatagctttgtagtacagtctgaaatcaggaagtgtgatgcctccagcttcgttcttctttctcaagagtgctttggctattcaggcaaataacctgatggaaaaatgggcaaaggacctgaaaagacatttttctaaagaagacatgcaaatgcccaacaggcatattgaaggtactcaaccttactgatcaccagggaaatgcaaatcaaaaccccacacctgtcagaatggctatcaaaaagacaagcaatgacaagtattgatgaggatatgaaaacaagggaatcctgcagggtacactgccagtgggaatgaaaattggtacagccattatggaaaacaacatggaggctcctcaaaaaaatgaaaatagaactaaccataggatccagaaagtccacttctgggtgtatatctaaaggaaatgaaatctgtgtttctaagagatatttgcacccccatgttcattgcagcattattcacaatagccaagatattgaaacaacctgagtgttagctggcagatgaataaagaaaatgtgattttctatatataatggaatattattcagtcttaaaaaagaaggaaatcctgccctttgcaacagtgtggatgaacccagaggacactatgctaagtgaaataaaccagacacagagggataaacactgtgtgatctcaattgtatgtggaatctaaaagagcccaactcatagaagcagagagtagaacatgtgttgccagggctaaaggggcttgggggaagaggtaatgggagatggggaagggttataaacttggcaatctaatgtacagcatggtgactgtaattaaaaatactatgctgtatatttgaaatttgctaagaaagtagatcttaaggcctatgacaccacacacacacacatacacacacacacacacacacacagagggaactgtgttattcagctctattgtggtaatcatttcacagtgtacacataaatcatcatgttgtacaccttaaatatatacaattttttaatttgtcagttatacctcaataaagctgggtaaaactgtaaactatagctatatttaaactacaaaactgtaaaaatataaataaaagtaaataagaagaaagtattaagcatcgccttgcagggggcattgtgagtactgtactgcatatgcctgcagcaatctgcacagatatggcccctgccttctggcgacttacagtccaggagggaagaaatgaggaagtggagcagcgaaacaccaagtagcaaatgctgtggaggagacagctggatcctagtcagccggggaactgcatgagtttccgaggtttcttaaaggtctgtatggtatctctcaccctctagcattttcagcagggagcagtctggtaacaccctagtactacctgtagtcagagacctggtggcctggaagtctataagatctatgtttaaatctttctgtctggtccgcagagctgctcagctcactggttggctacgaagcggaacacttgccatacaaagccctctgcgatgattagctcatttaaccctttaacaaccccatcagataagtagtattattacacacaaggaaactgaggtgctcggagaggctacataactgaacccaagtcagggaccccaactcaggtttgtttgactccagggcctacattctattcccttcagttccctcaacaggaaagatggggcaacatcctgtcctgtcctctgcctcccagttaaaaaaaaaaatatatatatatatatatatgtatgggaataaagacttcttgatgtgtatcaccaacatatctaatttggttttgaatgtgggggaggcaaaatgacattgacagataataggacttacatgaaattctggtttgtttagagatgctataaagagcttggcattgtcgactcatttggaaattcgacttccaaaggagcaaatgcaaagtatttctcaagccccagccctccatttttagatctgaagagggaaacaacaaggtaggtaactgaaagtctggagttgtttctatttagttgttcctaaaggcagggggatggactagaggaaacctgcaagggctttcgactcacagggttctttcattctgtgggcaccagttctctgggcatgagagatgccaaggagctggtgtgttttggagagctcatgctctgaagcacatcagaagaaccaatggttgccgcaagacccccttcctaatgcagatggagttttctgtgaatcccggaaggtgcacttgggtgggagggagttgaggggtagaaaaaggaagacagcccctacgttcagcagaacccagggctgatgtctgcaacagcataaagtgccttctagagtctaatcctggtcatccgtgtagcatctcttcttctctaaaccctcatcctaggctttctttcacgcttatggccacacacagtgaggctttcctctctgcccggaatccacagggcatcacccttcctctggagccagcttggggctttcctgacgtcagtagttttgggggaagccagtgtcacctcatctctgtcttgaagcatatttaactttcccaaatagcaaactctggttctttgagcaaatgacttccagatgctggaagcagcggctagtggaattttattgcccccaaactgtggttctgggctgcatacttctgacatgaaggtaatttggaatgtaaacattgcaagacgtgtgctggaattaattaaagcagccctgtattctctaaggcctgcaagcctgcaattaactgtttacattaacaccaagccaagcagatcaaccagaggatgcagggacccttgattttcactttctccctttaccttcagaaaacagtgaaacgggaaccaagctgacccatttccacagtcccaacctgagaagaggctgcttaagccatcctctctcgcacagcaaacaggcgacagcgtgagaagcctaactgggcatcacggggaaccaagggcaggcaggaacctcttccgcgatatgtcagacgtcagaggcttctttagccagaaatacaagtgtgcccttaaacacgaatggccacattcatggtgggcctgcagagaaaaaccgtggcatctcatacttgcctgataaaactagaaacagcttttgagaataattttgtaacttcatcatggcatttaaaagtagcatgaaagttttggagcaggatggtgatgatgattgcataataacgtgaatatacttaatgccaccgaactgtaaacttaaaaatggttaacatagtaaattttgtgttatgtatattttatcccccaaataaaagagcagggtgttcagactataaaggctctttgggattatgtaaactaggagaacccctggaatagtcctcatttatttcccccacgtaatacaagagggtgaagttctggcttcctgggaacaggcccacacaatgtcaggatatttcagggcatttatgtaaaacaccagaaacccatgcccctggagctgaccaatccttcacacccgctccgagtttgttagaggggtgactcttttggcagggagcactgagaaatgctgatatgtggttgccttcactattggctgtaactatgaaaagagttgctggaggctacctacttaccctctctcccccaaaggagaaagacttcagtatcctgcagcgtggcagtggggcaggcgtgcgggtgtgcacatgcgagctgttctgttgttgagactctagttgttgccggttcctccctctttatatgaagcaaggcaacacccacaacaaagcactgtaatctctccattgaccatccttctgccctcagatcaacacaagggccaattccattccaacagcattatacgactttgaaaatactctttgtgtcccgccagaacctcctcctcttctcttcagtttcttcctcatatgacacagcttccagaccctaaccaccctgggtgtctgctttgggtgtacagtagtttttcaggataatgcccagaactaaacccaatactaatagtggtctgctcagagaggggtatgggaattttatcatctgttctgttttgacttccatatgtccaacattatcccccaatgttgcatttcaaccgtcataccatcctttccttaaaaaagcttgtgatcatctgaagcctcagggattttttttttacatgaatgactgttgagcaagggctccccagtcctgaaattaggtaaatttatttaacttaaactcagaaatttactagaaatcttattcattatgttaaaatcagggcctttgatatccagatactgagtcctgactccctcacccactgtccttccctagctttgggtgtgtctatgtcttcatctgagttagaattctatatagcagaacttgattgaaatgctgtacagaattggcctgggagtacagagaccaccttttcagtttatatcaatcagagtcatgtgggtgtggtaaggccgccctgagtccacccagccaccaccatccagcttgggcttctccactttgctcccaaggattgatggagagtgtgcgaggactggttaaagagatgtatgctgtgatagacagggcaggctagcagggggatgtggtgcctggcatgtggcaggcatccactacattctgcgggctgagatggtcaaggtcatccctagcctccttgcaggtgatcattcagacttaacttcctccccacccaaaaagttgcctcaaaactgctcacaaagtgggggctttgagtttaatttctcctggagccctctggtaggacacgaatcagcaggaaactggcttgcaggtctttggaaagagaagtagcctaagattaagggcctagaaaatcccccagaaaaaaagagcattcctataatcagtgaggataaactaaatgacagtttgggacaacatttggtttccttggttcatttaaaacattgattcagagattggggactggcttttcctgacttaaaagcagtggagccctttccctctaatgtggacacatgctggttccctccctgccttagggaaggagtcggtcaggttggagctaagagggcccgggagggtctttcttggtgaagcagcattagccattggttgagactgaggcagacagggttttagctgaaaaggcttttatcgctttttatctattgacactttttcaattaaggagtctcccctgagatgatctatcgcctccctgtctgagcaggaaataattaccagcaaagcagctccatcacctgccgcatgttttcccatggccagggaggctcaggaaaatatcaacagcctgcctgctgctggcggtgcctatgtgggcacagggcacacggcctttccagatggcccagccctttcctctgtcttatcctcccccccacttcttattccctttgaccaaggtttttatattataccctgtcaccatcagggaatctagccacgtcaccttctctcctgggcacctgctcttctgaggagcttgcagccttctaggctgggtccatgcctcctcttgttccagggccccctatactgctcatatattcagatgcccagggacatgttccagcggaggctacccaggataacatttctatctcactgaggtttttttggagccttcaaaattccatgatctgatattttaaagtaaaagctttaaatataaatgtcattgaggtacagcacacagacggcaaaatgcaaacattgtgagtgcacagcatgaattctcacctcgtgcacacggctgtgtcgccagcacccgggtcaagacacagaacgttactcacacctctcgtgccccaactagtcactgcctcccttccccaggaaccactgccctgactcctaaatggcatagatccatttcccctcttgttgtacttgatataaactcatgaagtctatatttttgtctagatttcttgactcagaatcatgttcatgagattcatccatgcctgtagttttaaagttgttcatgttcatcggtgtatagtattccattgttcatgttcatcagtgtatagtgttccattgtacaagtgtgccacggtgtttctacccattctgtcattgatggatattttctgtctttttttaatggagaacatatgcatgtactttaattacctgtaatgcctaggagtagaattgctgggttgtagggtgtgtgcctatgtttagctcaattattgccagttttacaaagtggttttgcaactgagaagttttttcaatgtagaaaatgtgagaacatttatctcctcagcccctgccgacttgcctttatgaaagaaaacacagaggtggggacttgtgcaaggtgaggactgctatttcttgattcctggcctagttgcctttctattagcctgcaaggaacctctcttttgacggacatgagagaaaaggacacgtcctcctctctcccgggtcacactttcccccaacccattctatagctcatataattttccacaaagtgccttatttgaacttcaaatcttcaaggccagatgagcaccacagacgtggccttttcttgtttatccagagggtttggggaagcacagctccctgacattcattgatggatatcatctgcaaccgtctgctttccttttgtgccaacaatctgggcacgagagagagatgagtgtttgcttgagattgaatttatgacaacacggaaccagcctccatcagctagactgatgaatgcctgggtgaacatgccacagtttgtgttttttccccttctagtcgccacctttcttgattaggaagctgtgttgtcagtgtgctgacttattagggagaagaatgggctctagcaggcctttaaccatcacagttctcattcaggaaagaaacgaaggcaggtgttgtacgccccgtgcctcccacagagtcccgcaagctgtgagtgtcctcaaaccatccatccatcctcccttgaagggcttgggggaaggggtgtaaaagggaagaaaaaaccctattaattgtacgcacattaagttctaggcactattttaggtgcgtgtgtacaatttccggagcaaatgagtgaatgaatgattagttttaaaatacaattaagagttttgctggcttccccagaacagaaattttctgagacttttcctagatcacttttagcagtaagagtgccctaagaataatggctttttggtcaaagtctcttaatgtcactgaagcttgggaacatgttctcatcgggcaagagaacaacaacagaaaggaactgcattccagttccttgtgtataaaggtgctcctgacctctttggccccaactctaagggtaagaataaccataagttattgccagagggcagcaccttcatggacagagagcaggtgtttgagggtcccatgctccacccaggaagctgctggctccactaagagaatgggctttgggcctgttcagtttctaccaatgtggggcaggcccccaaagctgaacatagatggagacacagaagggcagaacagttaaaaatttaattccacctttgccatctcttatctgtatggtcttgagaaagtgcctgtgtttctgtgagaccttggtttccacatctgtaaaatggggagaatcatacctcccttattgggttgttatgaggattaaatcagtcagtgtatgtaatgtgcagggcatgtggtaaacgttcaagagtgtaggctttttgttattggagaaaacatttgtcaggtatctactgtatgcagacagaggccagacatgccttcaggtacctgcttcatgcacagctgaagctgacacatagtgctcagttagttacttgagactttgctttagctgacaaggaaagcccttggtcatcctgtataccgtgccaggcttggtctcatgaataggtggaatagcatgtatatggtcactgagtttcagtggagaccccaatggccaaaaagagaaatcccacctttcttgttgatgcccaaacaccatgaactcattagttcaccaacagaaaactcccaagtatctgctgaagttagggcttgtgctggcagcctgcgtgactgtgcgggtgtgtcctatgaagagctgatttgcagtggagacccatgtgcacaggcacaaaaagatggccagggacctcggggagaatgcggacactaccggctgactgctggtgagacttggactgaatgagaatactcatgccaagcacccagcatagtgcctgaaacataaaaggaaattatctcagacctactaggattttcttattaaacaaaacaaaacagaaagcagaaaacaagtggtggcatggatgtggacagattggaaccgttgggcattgctagtgggaatataaaattgtatcatttagaaaaatggtgtggtgtttccttaaaaaattacaaatataattctcataccatctaacaattccacttttgggtatgcaccctaaagaattgaaagcagggcctcaaagagatattcgcacacccatgttcgtggtagcatcactcacaaaagccaaaacgtgagagaaacccaagtgtccttggacagatgaatggataagcaaaatgtgaaatgtgattgcaagctttaaaaaggaatgaaattctgatccatgctgcaacatggatgaacctcgaggacatgacgcgaagagaaattagccagtcacaaaagacaaattctgcatgactctatttgtatgaagtgcctagagtaatggaatttatagagatgggaagcaggatgacggttttcaggggctgaagggagtggggaatggggagctattgaaggagtacagagtttcagttttgcaagatgaaaagccttctggagatcagttgcagagcaatttgagtgtatataacactcctgaaccacatacttatacatggttaagatggcaaattttaatgtattttcccacaatttttaaaaataattaaaaatttaaaaacacaaaaggaactcaaatgaatacttgctgtatctgaatccagatgaacagaagaaatccctccaagcactgtggccctgcgcaggccagaggctctggtggcgattggatgtgggaacacagtctgggtggagaggagatttcaggagagaagaggaaacggcgccatctccttcatttcataatcacactgaaagcagccctgggagaggtgaggatgcagtggcttgatctcatcctaaggaataaataactggcatcacattttaattagtggagaagctccgggagccaggcctgaggaagtgcgccttctgccggtgctcagaggcagacggggagagcagggggcgagccgagggtccaggacatttgaagggtggtgggtaggagtggtgctgcggatggcttggtctgaccggcccagggtttggaatagacagagtttttctcactcagttgacctagttgaccttcccctctgagaaaaattcgtgaggcatttaaagaatgatctttgcgccccttggcctgggcgctctccttctggggcgggaactcacaggatgagggagattttgttggagctgtggagtgtaattacaggcctgacaggtggcaagtcagagggaacatcttactctgcagccgctgaaacaatgattttaagcaaggcgacagcggagaattctccctattgtgcagggcaaccctgttgagccataagccagcaccacatccccagtaaaatcaatcccagtggtggaaggaggcctccatccgttggacctggcacccagcccacattgctcaagagctgtctctgggcctggtatatgctacgccctgtgctacgcttctgtaagcatatggctcctgccctcaaggggcgcagagtctagagaaggctctgctaagggtcccagaaatcagaggagtcaggctgagtgctgattcccagcttggaggagtttacagatcaccagacaggcaggcgccacacggcacctagaatagtgttgggcacggactaggtaccaaagaaagagaatggagggagagagggaaggagggagatggcatggggatggaggatgggaaatagggcagggagacagaaggtgggggacagggagtgcggggctagaggagcgggcagagagacagggaaggagggagggaggtggatggggagggttggatagaagagaatggagagagagaaggagagggaggagagcagggaaggaaggaaggcaggcagggagggaggcctactcctctaaatcctcaggaaaaggactgggaagctcagagttgagctccttttctgacaatagtggtgtttccaaggaccaatctttactctccagagtggggcttgtgagtctctcaccccagctgtttcctggggctgtgaagttcatcggctccttttcctaccccatcacctacctgtcacctgtcctgggcaggcaggggtccccacatatcactgcaccctcgtgggctcccctgccctgtcctggcagtgtacatgatgagcagcttacatgatgtgtagtgtacatgggggcggcgtgcatggtgggtggcctgtgggggcagcgtgcatgaaggcggcatgcatgggggtgccgtgcatggtgggcaacatacatgggggcagtgtgcttggtaggcagcgtacctgatgggtggcgtacatgggcagcgtacatgatggccagtgtacacgatgagcagccaccatgcatcaggaggaagagacctcgctcccacgccacagccccaggccccaggcccctgacaccctggctccgaacccccagcagccagcgggtgggttggattccagggtctccactcaggggcattgccgggtgagcctgagataagggtgtagctctgctcatttctggaggtctccacacaccctccgggcagacctcatcttcttcagacatttcttttactctttggcttgctcttgctgtgtattaaatttgatctggggtgtctgcaaatgttggtgctcacgggggtgtgctgggccgggagaggatgagcattcctcaagaagggagacagcagagcactagatgggaaggggctggaccctgaaagagcctgccaggtatccccttctagcaggaggggcccccagacatttcacttcattccttaggtgtgagtcatgttcacatttcagggaaaatgcacatccttcccagagctgaggaagccccatgagctattctggtcctgacaccggctcccaccctttaaagctcctgtccctgggggttttgctgcaggatggtctctgaagtctgcagccaagtatttcccttcccttcttagagggccacgtccctggcctcttctccagccccggggattcaggccattgggtgtgtcccctgcctgaggataagccacagtgttactgacctgggcccctgactccaaattgagcattagattgggtttccagtggttggtcagtgccatgaaaatcttggacttcaggtcctgtgggatccagctaccctcatcctaactccctcctttgactttattccaggctgacagagcagcctgcagttccaccctctatagctgcctcttggccttgcttttgtttaattcccatgtatttgttgaatatgtatgcatattttagcaaaaataaaaagtaagcagaacccaaataccaacacgtcctagtccatcaggtggcagtgtatgtgctctcagtctgagaaatatacacaagtcattaaatagcaattattgtaattagcagaatgtacacgtgattaatcaccctctgcccccgctcctccatttaccttgcctgtggcattagtggataccgtaaggggctgggagccagcttgtggtatagaggaaggagaaggggagggctggtttctctggggtttcttttctctctgggggtggatggttctttctgtgttactctggaccccctccaaggccacctcttctctcctccctttctctgtgacccatcccaaaacacggcttccctcaagaaaagctctctattaaatcagcagcttggaggtgtgcagtctcagccaggcattcaggccaaggcagctaggggtaggagcaggagacaaaaaggatgaggttcctgggtgcttggaaaccctcattccctgcacctatggctcggggatagtcacaggtcctgggtgacctgccagacaagctagaccatctacaaccctggggggcccagaggaggggcttccatcaccacacggatgctgcagcagcagctgtgtaaggcaatggatggctgaggctgcagcctataatcacgtatttacagttgctgcattatggaaaattaaaggtgtgtgaggcacagcctcttcagccaacagaggctgtctgcttgggctcagctcaggcagccagtgtcacctgcagctggaactgcttcaaatcctcctacctgtccaggggaggggctttttctggcttccaaggtggtcgttgggggggtgggggaagagcaggtgcctgtactcaccttggctcctcctttgttcctgggtgggatggatttgttctgttttctgtccacctgttagggcaacatagcttttggagtcccattttgagcaaggtgcattagcctggctcagttccttatctgtaaaatgggcacttgtacccatctcgtagggctgatgggatgattgaatgcaatactgcttagccttgtgtttacattaattagtttattaattctggtggtttgataaatattgagcacctacagtgtgtcaggatgaatgactctaggctctggggataaagcagtggctgagatacagcttgcatttagtggcatgtgtgagcatgtgtgtggggagaacaaacaactaagcaggtaaacaagtgaataaacaaggtaatttcatatagcactaggtgccatgaagaaggtaaagtcatatgggctgggaggtgcgggctctgagaaggtgacatttgagccgagacttgaatgaggatgaagtcctagccatgtgaagatctggaggagaagttgccaggcagagggaacagctcgtgcaaagtccttggggcaggaatgaatgaagtctgtgattatgttgtgatggcaactggttccttcctcgaaggtaaagtctggatcaagtttgcattaaatcccaaggtgacctggtggtatacatcagagaatcttccacctgggagtgaagggctgagttcttgggaggtgtcccagattagcctgatctatcagaactagacgcagctgctgaggctcattattgtgttcaatagccaaaactaatttatttatagggcattattaagaaatcgatttaatttgcactttgggtcaattgagttgcttcacacttgtgtgtgcacattgtttatctttacaagttattttccgtgcacatgtgcctgtgtgggtgatgaacaaggagaagtgcttgagagcccgggaaaggcacatctgcctacaaggtgaatcgggctgaatcacaggggcactggagccacccccagatgaagacatctattttcaatgaatgtagtaaagcttttcctaacttcagaagccagcaggtggactaagggctgggagggcccgagggcctgcccagcacattgactctggagactacgcattgtatattcctgccaccgtgggagactcccaatggccaccagtggtcatgatgcccgggcatgtgtggcgctgtacagtcatgaatcacttccatctgcacgatctgcaggctcagaacagccctatgagaaggcaagagagaaatcatcttctccattttacagatgaaaaatgaggctctgaaaccttagtggactgtccaggctagaaacgggaccctcccaaagtcaggtgttcctcccccttgcctccctctctcccttccttctgctcaccccaaatgctttgttgagccccttcttaccatgccgcgttgcacggcagttatgctgtggcattgccacctgccagcttgcctgggctcgaatttcagctctatcccatagcctgttgcatgagcatctgtctcacgaggttaccttggaagttaagtgggtgaatacatggcaggtacttagagcagcgcttggtccatagcaagcactccacaaacgtgagtggttgggtgatgaagtggccctccgcctgcctgctgcaccacgctgtcccgacgctgtctgttctgaaggtcctcaccactccccatagctgtggtccagccctggtctctgaagttcttctttcttgtcctctccatttacctgcctgttctctgtgacgatcctcaagccctatgctctttccccatcttctccctccccgccttcctccttccttccctgtttctcctctcttctttgcacacacgggagacagccagacacggctgtagctctttttcagccgaccttgcttcctctatctcaatctggtaattcacaaccctaaggaaatttgaagttctgaagatgttctttaagctcacaatccagaaaataataattttttaaaaagtatttcagcagccttcactggccacaatgttgaggggctctgctccccctggagaggtctctctagcctagatatgctggggttcactgcctgcagctgcaccttggcaaagaccaagggaggaagttgggcctgtttgtggaataggaaaatagtggcagaatctgagaggacggtgagtgtcgccatcagaataggattagagtagacccacataggaggcgggatcttcagctggccccaccacacctacccctcaccaccctgtcctcccctgcagtgcccacacactgagcttgctgccctggacctgtcccctgcgaccctcaaaaaaccagacctgaggcagcttccatccctgcccagtgacagctcatcccacagtttatcttctgcgagctcatgcttcctgttcctgggttgtagcccagcacatgaccaggagatttggggaaatggtgcattaacttcagggtgggtctaatggaggctgcgtagggcattgtgggagtccgtgcagggaggagcttttggtgggggagggggttggggcagggacctctgtctctgtctggaatcagaacctccccctggttcccagcagagcctagacggatgggggcgtacagtggggtagtggtggtgagtgaagggcatggagaagatgaaatctgagtccttccattccagttctccatcgcaggagccgggtctgtttatctggtgagtctggctcatgtagtcagtctggacatttccatttgagaacaagccagttggctctatatataacccaaatgtccagagaattgtcaatccttcccttcaagtctaaaaataggagagcaagtcccagttctgatgcttaaagatgactcactctagccactctagcctcagtttccctcaaaagcccgggggatggggctgacacctcagggcttccatgggcctggcacaaaacgtgaaaccacctcacagggccacagacacttagaggggcctgacaagtgttcatttctcgattcattttgctttggggagattttggattttttgtcatctcatttctctggaccaagaagggacaagccgcgcccttgctgcccgaatctccacctggtggcacctgagtttgtgcccagatgacacgctggagttgtcctgtttttgtccaagaccattgcacacatgcctgaggaacacacagcagccctgggtcccgcgcttgcactcggagctgcccgggccccgcctccccaggagaaaaggctccctgagctgcacctgctggagcaggcatgctgccaggaccctgatgtttcagctgcttctctgctctgtgattctgtctgaagtaggaaatagggcaggcttgctggtagactccagaggtcattaaaaatatgcaaaggaaataaacaggcctccatcaatcacttccttggcgggcttgcttggaagggtggctggggaagggcatgctgggtctggggcacagagctgggcctctcggggggtttgctgtctgtcttgctctccatgtgatgaactctgtcaggaaaatgccatggagtacctactacgtgccagggactgcgctggatagctttctgtaagctatttagtcgttactgttgcctggcgaggagtgaattactgtccatttccacagatgagaacactgaggctcagagaggttaaatgactgacaaaagaggttaaatcacacaggtttagacccagctctggtttcaaagctctgcctggacctgggctctctttcccaaggtctgtgccagccgagagccctctgcagtcctgtaaagcggatgagtgtgccgccctaccctggctcccatctcctatgctctgtgtgtcacctgctgtccggaggcacccaccctcactacagcccctcctgggcaacctctgcccaccatccatactatctggtctcgagacccatttcctctgagctgctctcacattggaaaattatccaagaaactctctgatacagtgagaatacctggtcgggaaatagtagattagtttactaggggagcaccttgttttcacagaggcaacgtgttttaacagaggactcctggaaccaatcctaagaagtaaatgtctaatagttgaaatttgttctttttgggtacatggtatatggtttattggaaggaatatcggctgtagagttacatatcaaatcccaaccctcacttactcgttgtgtgaacttggacaaattatgcaaactctctgagctcccactgtaccatttgtaatacggggataagtgaagttacgcacacaaagtgcacagcacagagcctggcattcagcaggaccatcaataaatatgagtttccttcctttccctttgagggcaaacaggttttgctgctttccttcaagtcatgtaatagccaccaacttcacttatgcatcagcccagccctggccatgtagacaaggtggtggtgttctgtacctttcgtgaagggacactcaggccacgagctctgcggacagcaggaagttttccctaggccagggaggaagagggggactgaaataggacttccttcagacatcgccaccagccgctactgtgtgtgcgagctcaactggcttttcccaaggggcccttcattccactcacggcaaacatcagcctggccagccccctgaggacggctgtgaggaagggcacacaagggcctgcagaaactctgggggcagcagggggaggcaggactcacccacatttcagggggagcgtttttgttcttcatcatcaatttttttcagaagggcttttgaggggtggactaaaggaggcagggagagaaaaaggaggatgacgagggaggagagagagagcagagaaatggtgcataaagggggcagatagttaggaggataaaggtggacggtataagctgcccttcattcagagggaacgcgctgatctcatgttcattaaccatcagctgggaatcttgttaaaactgcacattttgaaaacttaatgcaaatctttgaactttgattcaataagtctaaactagggccctaggaatatgcattttaaccagctcttctagcaatttggatgtagatatttggagaccacactttgagaagtacagaaccttcagctgggccctggaatggagattctcgaaagtcccaggctcctttccctggtaaaagcagattctttatctcattagaggggctgccactgcccttggactacaggagctattttccaggaatgtaatcaggcttgacccctgcctcctagctctcgccatgctgtgtctcctagtaaatacctgcctgcaactcttggcattgtttttggccttgagggcccagcctgtatttcaccctgttctcaaggcctggctgcattgatcagcccactggatttactgcctgaaacaaagcttagcgtgatacttgatcgatctctcctcatttcatgtcactcagaatggctcctgctggaaggtacctgagagacgatctggttcaattgtccttaaccagggtaggcatcaacaactgcttgtgaagctttgtaaaaataggcagggccaaactccaggaggctcctgatttggtgaacattctctctatagtgccatggcagatatatcagttaccctctagtattcattcttgcctccttcttcctctgctgggaatgtggatgtgatggctgcagctttagttgccatcttggaccatgagtaggagatgatcagctagtgagctggaagcatctggtgtccacagactgagtggagtagactgttcacctcggagttttacataagagagaagaaatgaacttctatgttgtttaattaacaaaaaaaaaggaagcccagacctgctccttgagattgaggtcctggatgctgaattcctgttcttctcaattttccgctagctttgtaagttatttgcaggtaactgctgtacgtatacttcctttgcagatcttacgaaatgaaacacactgccaggcatctacagtcaaacaacaaacacttagctgactgagcaagtggttgattaggttgcctatcctcccctttctactcaaagaaaatggggttcattggtagcgtcaggaattctgggctttcttcctgattctgattctgatttcgttctgtgccttggcattcactgtggtccacggtagaatgacagtctttaaccagacgacctccacactccatccatttctaacattctgacctaacggtagttctgagaggtgttcgtgtggtgtgagcaggaactcggaatacgtgaacctgattggctaagcttaccttgtggttggttgacaaatgactaggaaatggatggagttgagggttgatgcaacagcgtaattacaaggaagatggtgaacttggaaggttgccttgccaaaagcaaaacgaaaattcagttacctcattataggtactcatgaaggaagatggtgtcagaggaaaaatcggcatgactggacctgctgaggtgaaatcactgggaggtgaggttgtacctgaaaactggacctcagtggaaaaccctcagatggttcctcaccttacttcctccttcacctatggcctgttctcctgaatatccagttcaaaagatgagatcatttaattactctgtaggagaacatatcttccagatgccctagataggggggcagttctttgcagaggaagattttgatagaacttcagccaaaagagtagtttcattagatctgtcaaagcggcaaggctgctggctccttttctccccgtgcactgagagtagagagggtgctggctgtaatatctcttgccccccaaatgatccttgagctttcaaggttcacagaaatttcctggatgccccagttctttcttcttagtacctgggtagcagaacctccctggggatactcagctccctttattagagagcttctgcccagtgaggctttgtgcccaggtttaacataagttcctggggtgctgtgatagcagtgaagtcactaggattctagcatttttgcccccttcttttattttaatttgtccaaaggtgtgacttagtactgaccccagaatgggtgttagaatgagctgaagcgatgggtggattagtcaagtttagctccaaatgcagccctgattgtctgcttttgttcattctccctaggaaaggcattaagaaccccaaaagtgaacattagtgaattatcactcttcagaccaactggagcagcttcagtatggaaaacataggtgggcatgggcttgatagatgagttttatggaagctgagaactgaatcaatgaatgccacttggtctgttcttgggccatttattcgccatcttggtgcaattagacaaggatgtctagatgggggcttttactgtgtcagcttcaattagcaagtcatttttagttgttgctaatgcatcttctttattgtgccattgatcaattgcaacattcactttgacagtgtgggtagacaaggccactcaaggcagcctccacagaatgactaaggagcaatgcggtgtctcatctgggaccaagtggaatttgtctgtgtaataatcaggtgaaattgagtactgcttgttgtcacccttgttctatttttacctctcggattgattttttcaggatcaatgacagtatgggcattaacaaaatttgctgtggatgcctcctggttttgtgatagataactaaagatagcaccctgaatagcaatgttggtatacaatggcttcctggtcctgttggccacctactgagtctacaaacaccgcagatcgatgctgctggtctaatgactgcatttcagtctccacccattttctctaccagtatcatgttcttttcctgtatgtaactttggaatggttttgattagtggaataacagcatcaacagtttctaccgttattacaatttttcaaacacatggaactctgtaatgcattagccagaattaggtgctctgtcttgacattacctagctgtttgccctactcaagcccaagtgtggaaacttgctcatgaggaagagtcccttcacctgcagtgtcagtgcaccaccagccaatgcagtgagggccgatgcctgtccccatcaatgaacatcattcctttgtgcctcttgtcaagcaagtgcatcctattctgcacatgccacatgctctatcccgacttgtcactttaggctcttccagtctaccccccaaaaataataataattcttgattttagcattttggcaaaaggaaccgtttttgctgctatagatgttgtgtggttgtgtgattatggggacatggtgaagagtccagtgtgcactttatgaagttcacattagaggagaataaagtaggaaaaggggaatgacctaagacaaaaaacaagtggcagctgggcggctgtgacttcactctcatagtccttgtagtgaataaactcccctaggaaagggccgtgctgcagaatggcagccacttcttgtgaaggccatgacagctggattttgctccaggaggattagaggtctgttgctggaacagttgagccccagatggaataacgttagttggtttacatttaggggccgtgttgtttgaaaatacatatctttaaacactggaaacccactcagtgtggtgaagaaggccacaggaactaagaaagacaagctgaacagctgtcggggtctccccactcacatggggtggacatatgctgagagaagggtggatggtaccacacatcctgtttgaattgcatcctcccgccctctcaccttccctccctctccttatctcatagaggaatttgcctacgtaggtcaatgccatggggcttgacctgagcatgagatgccggggaagacctgcgttctcgtaggaaatgtatcggtgtgggaggcctggggtacgtgagcttggaggatcacctcatattgctaagcctcattttcccatctgagaaataaacaagttaacattaaaaacaagataatttgaaaaagaataataactaagatttattgagttcctccatgtgctaagcactattttaagcatttaagtgttttgactcctttaatactcatgatatcctgcaaggtaggtgcactgattagccccattttacaggtgggaaagctggcgacttgatttgaatccaggcagcctggcttcagtccagaggccaagtgcttagccaggatgctatttttccaatgtcctaaattatgtgggactaggagagaaaaacagttttaccctgcaacctttataaagcccacttggccagatggagatacaaaaagcaatttctaaaaacaacaatgataaatcagtgatgaagggaaggattatataataaatggtgctaggacaattggttagctgcttggaaaaaatatcaaagcgatttggatcctcatctcatacagtttgccacaatatattccaagttgattaaatagattaatggaaaaagaagaagaaaatagagtatcaaatgtctgactgggggaggactttaatagctcaaaacagtgaaagaaattacaaaaattggggatagttacaactttaaaaaactggaagtctctgcatcaggaataaaagagcaaacaataaatttgggaaagtacttaccacgaatgtagtatttttccttaatatccatatttaaatatgtatctaaagaaatgcgaagactctgatagacaggtgtgcaaaggagccgtatgataccctaataacatttggaagtgttcaacctcagcaataatttaaaaaattctaatttaaaaagaaataccatgttaatatgattatatttattcatctatatcatatgtacatgtatggatgtatatataatatggattatgtacatacacacatatgtacatatcccaactcgagagctgctgaaaggacttagaaataatgacacccctagagcaatatgtgagtctagcatctagattttggtttctaatattgtgctttactgaaaggaatcaaaggcaaagtcagcacaagagagcttcttgctacatctggtgccagaaagtcatgctctcagaaggacgaggtcgtgtcaaaggacacagaagtcccatccaagagcttcctactgcctaaatcccggataattagagcatcaaaagagaggagacattaacagcttaaataagaatccatgagtctataccgacatacggaagttagtgaataaacggggcagaatgaggaaaacttttccttaggacataatgccaactaacaaatgtggacacgccacccaatgtgatatcccaagatggacccaacatcacttccgtggtgctcctgcccaaaatgcgtgattctgagctaatcaggaggaaatattagacaaacccaaattgagggacatgctacaaatatcctggcttgttctttttaaaaaggtcatggtcatggaagacagagggatggagagaactgttttagattaaaggaactaaagattaaaggaactaaagaaatatgacaattaagtgtaatgcatgacttaggttgaatcctgaactcccttttattaaattttttttggtataaagggcatggggtgaaatttaaggcctacagattagttacagtactgtgtccatgttaaatttcttattttgctcatcacagtatatgaaaatgtctttgtttctataaaatacatgctgaagtatttaggcataaaggacatcctgtttggaacttagtctcagatgattccaaaaaaatatatgtgtgtttatgtatgtgtatgtatgttacatatgtatatttctgcctacatacctatctattgaggaataataaagcaaatatgacaaaaatgttagcaattggaccatctaggggaagcatctatgtgagtgtctttctctgttcttgcaacttttctctaagtttgaaattatttcaaaataaaaagataaaaagaaaaaggcaagtgccctattttgcttgttgatgaataaggacaagccattgaaggagaggatgtgagtgtgtagcaggaactcctaaaccctagccacaggaaagacttggccagacttttctggaatgtaacttggcaatttgtattaagaatcttaaaaatatccataacttttagccccatttctgctcaaataaaataaacaaaaatgcaaagacgtatgcacaagtatcttatgacagtgtgacttccaacagtaaaatattggagacaatttaaatatttaacaatgggggcctggtgtagccctaccatggaataggatgtgcccatttaatgatgtctctgaagagtttttaacagcatgacagcatgcttaccttatcatgtcctgtgaaataccagaataaaatgtacatgcagtagaatctcaattacatccaaaatacgcattataaatctggaagaaagtaagccaaaatgtggagtatacttggtagcatttctccctactttttaatatttttttagtaatatcacattttttatcataaggaagtatcctaaaggcagaaaacaacaaataaagtagcaatgaagttctgagtctttctgtgactgtgtgacgacagtgtctgaacagttatccctccggcagtgacgagcagccccttggacatgttccagtcccagttcttcagacttcagaaagtggggaagactccgtgggggaagaggaggggttgctgatgtcatggtgacaacgtggagtgtggcacacctacaggtcttgatgggctgtgtgctgggcactccggaatctcatttaatccccctagtggataaggaacactaagtattggagagacagaatgatttacccaaggccagtgtgtagtaagaggtgcggctggaattccaggtgagattgggagactccaaaacctgtgctcttaattccagccctgcctggcctcctggatcatgcccatggtgggtgaactgggggcgctggcccccacgctgccatcctgacttgtcagcctgtttgcttcctcctctctgttgtgatttcctcaagcttgttattaaataacaagcatccttcctgcgttttctcctggaattctcatcccacagtggcctaaggggaaggcaaactgtatgcctgtgcataggaagcatgaccgcgccatccagcctccttccagtagcagtggatgcagccttgttagggtgattctgaccccttgttctccgtcacctcacaaggcgtaacgacaggggacagctgcagagagagatggaggttggcattcagaagcctttctgacagcaagagtgaatcaacacaaaatgaatcacacaaagacaccattcactgtctccccagagagcctggagaagaaatgcctgccatttgtgtagctctttttgatgttcaaagctctgtggcacacagccctccttagggtctcacaagaactccctaagaaagacaagacaggaattacttcccttaggaaaggaaactgaggctcagggaaatcaagttacttgcctcccgtcattggtgactaggtcagtcttctaacttcctctttatcccttcttactccttctgcaaacagtacgatgctgggcagagtggaagatcccttattgtctcaccctggggcaaggagatgggctagatcattcctaatgctgcttcctgcctcagaagatgaatttgcctacaagaggtgggccctccatgcttataaatccttctccttcaggttacccccacctagtgaaaaagatttacacaaggcagaaagtgggtggaagccatttggccactcatgatgtcttattctagaggaggccccctgaagtgaaggtgccacagcattactgcagttcagcagacatttaccagcatatgccagtcactctactggaactgaggagagagaaagccagggaaaaggttgccatgggttgagtcaaaagaactcattctaggctcaaaaggacaggagcgctggttcattaggatgctcaacttccaactagcagactgggcacatgtcctagagaggaattgtgctgtagtgaggcgaagtgggcttggatgtctggcaagtcatggttcagatactgactccagccaggcacggtggttcacgcccatagtcccagtgactcaggatgccaagacagtaggatttcttgaggccaggactttgagaccggcctggactacatagtgaggccccgtttctacaaaataatatttttttcaatgttgactttatttcttagctgtgtgacttccagcaaattctttaacttcattgaaactcagttttttcagctataaaattaagagaataaataaactgtcccattgtatgatgcaaggattaaatgagatgacagcaactaaaggcctgccaccatcaactcttggcaatttatttccctcctaaattagatagaaatgtcatggtttggggtttccattgtgtgttcaagaaagataagaccgtaacgcctttcttaaatgtctaagcttcattatcagagcttcttgcacgttctctttaagcttttcccccatagacctatccaatggccccaggctgaggcacccattccagggactcccacgcctgcttccaagctagcagtggcctctcatgagcctcaaccctattctgagatgctctgggtttggaggttctagtatctcagccacacatagtgccattttaccttgtcccagctggccaaagtgtgactgtgatcccctgtcttccccctcactcacccggcagcctcatcttggctgctggcgattttaggctgggttccacaagtggccccagtgatttatgatccataactcagtggtctcttccgccatgcctgcaggctcccaccttccggaagtcactggaatttaaaacaccatgaaaacaaacatctgtgatttacgatgtcaagagccatttccttcctcttgagacaatctccagggtgattttctttaggtcatctgctctgtagagcatattagttaaaaaaaaaaaaccttaaacataatgtagaaagatgtgcaggtatggaagacagaatggcagcacctttccacgggtggcagccatcagacagagcaggacatgcacagcgtggctccctcctgtccctggaaggcaggtctgctctgttctcttctttcacatgtgtctactcccagcctttccaggtgcaggacagggcaagcatcagaaacactgggtgagggaccggccctccctttgagtgcttcctccctgcacatctgagtcccatctgtagacccagagtgaggacatctgcccaacctccctgcaggctgttgtgaggtcagcagaggcccagaagccatggtaacttctataggagagacgcaggatgaagaaagttgttgtgacttttgcccagaattgtcaagaatacttcaagtggtatagatgtttttcccaaaaaaaagtaaggctgaaaaaaatcaaggctgatcctaaggctgttcaagtacaaacagtttgcaagtaatggaaaaagctataaaattttaatatagggagacctcaaagccttgaaaggaaatataaaacaactccaaaaaaaaaaaaaaaaaacaaaccctaagcatcctctttgttcctcagtgaaaatttccttactattttaagccacattgattcccaagagagaaactggcaaagcatggatggagaagcttcatttccctaccactgctgtgaaaataccctatgctaatttaaggatatagaattttctaataaaaacaaccagagtgcactaggcacgattattccaacctatctttctattgtattggtccatctactttgccgatttccaaaggaattagagacggctttattacatttaagataatatgaaagaagacaagtatagcccctctttgatttttatgttacacattgggcagtaggtttttaaagagccgtgtttgactctgtcctattttggggcccaggtacatgattcctatttttagcaactctctggtattgtgaatctgagatttcaaccaccagtgagtcagaaggtctggctgcccagagatatgtgactcagacaggcaggaatagtctgttcaccatgagatgagggcttaaaggggagcttttgtgcttagtgaaacacgcaaatgaaaacaaccgtttaaataggaacctattgcccttccggaaggctctttgcctgtccccgaaaattctcagctcacacccagggaagagctggtgctgctagctgggaaatgaggccaaccccctggctacttcctcctctttaggggccctctaaggcatctgggcggaggtttctgggtggcttcagccttcagaattaacacaacagcctcctgatgggcagcagtggtgggagaaaggagcgagtggagtgccatgtcgggcagggttgggacacaggatgagatactactcttttaagagtaagacaccgcaagaaaaggtggcttcccctggaaaggtgggaagcaacagattggtgttttcttgattagaaatgctatggaattcattcatccattcaccatccatccatccatccaaacaaccaatgcatatgggaagctggctacgtcctcggtcctttgctaggtactaggggactggtttccatcctcgagaagcccacaggcttgtgggaggaagataagcaggtagagaggcagcctggctgcaatgcccttccaagaccaaggttttgggattccaagtttctgaggtgttctgcatggtcagtagtccctgagaggcccttcccctgtagaactgagtgagcattcagggtaaacctggctaaacacagactagccaggaccattgtttctggccgtatgaacaccctccttttcctttcctccagacttagactccttttggagccaagcaccccaagactgtaggccttctctgggcgtgagcctgagggtcacagtgctcaccagccctccagcctcgccacagtgaagatgcttatcatggaggctgggatagttgtgtttttcgctggtgtttagatgttccagtgttccatgaaagctcctgaatctcttccctaaataacaaagtcctgtttggtatttggtgaaatgtttggagtgccgtgttcaaccaagctgaactaagctgctgacaaaatactgtctcagccctttaataataatagctaacatttgtatagcactctacagtttaacaaagcactttaaatgcacccagcccctttgagatgcgagggcagagttatcatgtgcgtttcactcaggaaaagtgggctgcccagaggaactgagtaacaccctccaggacccaccactggggaggccagaagctggccctcctgaaccaggcactttgcccttggccaccttctctgaagcctgtggtgaccacgcctcctcctctgacttcaggtttggtctttgcctctggtctcagccccctgtagtatcccacaggcagcccccaggcagatctccttaattgtcccctttctctgcttcagcacctggaatgactgtcccaggattaagtccacacttccagcctggaatcccctctctgcacagcctggtcctatcccaggaccctacactccccctcactacccccagcatgcctttcctacagccaggcaggacttggcaggagcatgccacgccaactttagaccccagtgctggctacatggggggaggagagggcaactcgttttttaactattgacccctccttgatgtctggcaaggggctaattagcagcaaacgtcttctgaatcagtaagtcagagaatcggtaaatgaagaaaacggacatctgtataggcataatagcatccccatgcagtccatagcaagaagagaccccagggtgggcgccttgtgcacaagggtctgtctgagatagatgccaaggccaatggacacatgccgtccacaggtcctggctgtgtggctcaggatgcactggagccaaaagtggctgcataccagaaatgtccccccacccccacccccatgaagctgatacagctggaaccatggtccccctccctccagtcagtgacactgaccaccggtggctcatctcagctgttcttttggcagatgccattcttttgctccccagagactgggtgatgtctgagagatagggttagggttggcaaggttggtgtgaagtgggtaactttggagcagcgagcgacccggtatgcctgtgcatccaggacacagggcccaggaagcatgagaatagcaggagccttggaggaggtgcccttgggggtggaatagggctcttgagggcttatcctaggcccaaggaaatgaagggaacttctttccttcttgtccctttcccccaacacacccccaagttgagctagcatacccatcatgctaaacaggtttaacaggttttatgatccaatctgattatcttattatgagttacagattgttttataggaaaaatgcttccccccatatcaataatagcttctcttttaatttagagaataatttcaaaattataattacacaagtacagtcacgaattgcttaacaatggggatacattctaagaaatgcgttgttaggtgatttcatcatatgtgaacatcatagagtgaatatacacaaacctggatggttgagcctgctgcacacctaggctatatggcgtagcccatcgttccttggattccgtacagcatgccactgtacttcagtactgtaagcaattgtaatacaatgctaaacatatctaaacatagaaaaggtacaaagtacagtataaaagattaagaaagtggtttgcctgtgtaggtcatttaccatgaatggagcttgcaggactggaagttgctctgtgtgagtcatgagtgagtggacatgactgcacactactgtggactttattaacagtggacttaggctacactaaatttataaaaaatatgtttcttcctgcaataatacgttaaccttagcttgctataacttttttgctttataaactttaatttttaacttgatgactcttataataacatgtagcttaaaacacaaacacacagctgtacaaaaatactctctttatatccttttttctatgtgatgtattctattaaaaattattttattttattttttgctttgtaaattttttgttaagaagtaagacacgcgcacatagtaacctagacctacgcaggtcatcaagatgtcatgaggtgataggaatttttcagcctcattataaccttatgagaccaccattgtgtatgtggcctgttgttgactgcagtgttatgcagcacgtgactgtcgtacatagtcattatcaaaaaattaagggcagatttttaaagagcaaagaagttcattcaaaatctcagaccaaagggatactactctcttttatgtgtatatccttccagtctttaccatgcaaatatggaaatatatttttttaaaaaagaatcctactacacatattactatgtactttggtttttaaaaactatatgtaatgactgtccttttgtggcattaaatatgaatctgcagtataatgtggaatcctgtgaaggtgtcctggtgttcataattcatctgctgtttggtgagcacgaagctgttttcacagtttcagcagcacagtgaagaataactttattcttctatatacaactttataatgtacataataacatatatatgtaaaataaataactgtattctatatatacccctttttgcagatgtattctaacagaaggatttataggtgaaaagttatgttttttgctttattttgccaaaaggcacttaagaaagcctgtccaaatctggattctcagcagcagaatatgaaagtttctgactcctcacacccatgccaacaggctgagcattatctttattaatctgaaaggaagaaaacaagtgaatgggacatagcattgggaaaatgctttctgaacccacaattactcttctaaaacacaacccaagtgccacctgtacaacctctaacaaaacatggctgaacccaagctggggcattcttatttctacctgtagttaagataaaattctgatcaacagagggatccggagggtccctggaaatgtattgagaggagattgatttgatccatagctgaagtttccttgaaaaaagacactggctgggtgtggtggctcacgcctgtaatcccagcactttgggaggccgaggctggcagatcacgaggtcaggagatcgagaccatcctggttaacacggtgaaaccccatctctctaaaaatacaaaaaaattagccgggcgtggtggcgggcgcctgtagtcccagctactcaggagactgaggcaggagaatggcgtgaagctgggaggcagagcttgcagtgagccgagattgtgccactgcaccccagcctgggcgacagagtgagactccgtctcaaaaaagaaaaaaaaaagacttggccttttaatgaaatacagcgatacggcagtaggcaccttcaacactccctagggggagtggacatgaacgtttttgcatgtaagacttggtcgaaagccctggtccaggcctggatgtgccacttgttacccttgtcacctggacaggcctcttcctgttttcacctgcggtggcttggggcagtgaggggagtgctggggcactggtcacacagatcctggttcctccctgcatcctggctgtgtgactggcaggcgatctgcagaaagattgtgtctctgacccctgggatagcgtgaggattagagcacatggtgcgagcttggcacttggtcattgttttcctttggctctttccctttttcatctgttccagcgagggattaaactatctgatgtctaagaaccccatgagatccaatttcctgaggattccaaggcagcccaggtgaggccctgctcttctaagtatgaagttcagagtcgctgtggaatccccactctgggaggcagtgctgtgcgggccctgcgtttcacacaggtagccacaggcccctgtgcacacctgagaggcagcctcccgcggagccctgctggactgtgacgttatccacatgccttagcagatgtctgtcattgtcttcttgcctttgtgggtttgtcctctgtttagaaaaatgaatttcctgagggcaagaccaggttcatcatctcctctgacttttgcctgccctcaaataagtctggaactagtacgagcacgtgtgacggaccctcattcaggggtaactgactggttgataaggagtttgactggcaaggaagtgatttcaatgggtcagcctctctggccctggctgtgatgatctgtttaccgcagcttaaccttagtggatttcagcccatcggcacaacccacatagccccattcagctcatggctgcatttaaggcccactgatagcctcggatttggggagtgttaaccccatgctgcttgggtatgcttcgacccaacctcacgggttaaaatcatgatggtgaggtattacagggcccagtcatttgttaggaaataaaaccagactgtttccaaagagtagagaaataggatgactcatgaagtattaaccacttaaaaaccctccttaggcatgtcttcccttggctcccttgagcggtgtcacccgacagattgcagtatgattgtcattgctgtgttgaagttacccaccctgaactcatgctgggtatcctcagtcagggcatcgttctgtttgtttctactttgtgcacataactggtaccttttcttttccctgccctgtctcgtcacttataatataaagggagttaatccagccacttgtatatcctgagtcctttttgtgtatccagcactttgtaaatttactataggcattcattcatcctcttcctcattcaatccacaaatattgaatatccacaactggcaggataacagccagttgctttgaacaaagagtttctttctaagcccatgaatgtgactatgcctagcacagtgcctggcacactgaggtgcccagtgcatttataaaaagcaactctcagggttcttgacggagctgtgtcatactgaagccccctggcctagatagattcgcctggatgaaacacttccctgccttcttaaacagaatgcattgaatttactttcatcttttcctgatgcctccaagccatcattttgaacatcagtgctgcagtaggatgatgtgttgcttctgttttattgaggtataccagttctttgcccttaacgttaaatcagcctgagtgttgtctttgtgagcccttgtgtttgatttctgtagtttgcctccttcccagcagtgaaactgaggatgcttattttttattccatcagtgaatctttgtgataacaagcatcttacatttatttagcagttttcatgtgcattattttatttaagccttatatcagctctgcaaggcagataggatcatttccaatttgctgattaaaagagaaaaaacaaacaagcaagcaacagactgaagctttcaagagctcagcaacctgccaaagatacatggctagaaggaagacactgggattcaggactgggtgtcctgattctaggctgggactctttctgtgccaacatccttcttccctttagcaactcccaaccttctttctagtttggtactggtaatctgccacaaagcttgttaaaattgggcgcaaaatgaccaggtgaaggtttaagagtctctcctttggagacagtgtttgagatttagtgcctgggttttgtggcctctctctatttggctgttcacaacctttttcttctctctgtctgaagtgtaagcaaggaggaagggtaacagatcgaattgccagatttaacaaaaaacaaaacaaagaaacaacagaacaaaaccaaacacaagatgcccagctggatttgaatttcagatagacaacaaataattttttgtaagtatatcctaactgttacatggagcatacttatactgaaaaaaaaattatttgttgtttatctgaaattcaaatctagctgggtgtcctgtattttatctgtagccctaataccaggactgtggctgggtgggcagtgtctgatctgtaatgacagcagagtcttcagtaagagtgggggctgggaaaataaattaatgggttgcagaatgtatagtgttaattagataatgcttcctggaaaagacggatcttgagctattatttacagggcagtagggaaatgatgtggccgctagctgcagaaagagcaactcatatgaaaaagaatggcagaccggagaggccaaggctcagagacacatgcacacaccaaataagggtctgtttactttgactgtaaaagtgtattactttttgactgcaacaatgtttcatctcctgcctaacataatgaccagtttggttcctgtcctggaaatagagaaaacggtgccaccttccccacacacttgagttgatctgacattgatagtttgaaaactttggttcccccaggcagtaaatttaaggagcaaccctgtcttgaaaacggaattaggttaccaaagacttccggcagttgagaatttcttgaaatccagaatatcatattttcccaataatgccttcttgcgatctcacacatcatgcttttaaggccgattgctactactgttaggaaatttacctgtgatggtctcaggtaatagaagttgtggataagttgaaaattgccagcctgttaaatggaatgatgtagcaaagaaagggcattctttttgaacacttcctccaggtgtgtgagcgtttcacactctgcattttcacagtatctttgtgaaggtagctctgggttctcttgcaccctggagaggtaggaacatgcctagtgccctcctgtgagtctgtcccctctcttctcttattaggggcatttgcattacaaatccacagaccaagcaactctttttaaaacatttatgttcaactgcttttttgagtgcttatcattccagagaatgtgaagatacatggcccaaaacctcctccctcaatagtgtcttgagtgcggagtctgtgggctgtcctgggatgggccctcaccttgctttattcccacagcacacctcactcccagatgaggatgtgcgcctatgtgtgtccctgtgtgtgtggaggctgagactgcaggcacttgcccaatgccccatgtagcaccactgagattcaagctcatgtttttttatttgaatgtcatactttctacttgccaggttactccatcaaaacagtgataacaaaccaggacagggcagatggtgcatagtggtggcagaattggacagatttaactgtttctttaagaaatatttactttcttgagcatttactgctgccctaagagactagctttggggttttcctagcttcgcagaagtgtggacgttgattccagcttttcccaaacatttttggccttgaaatgaagctgggaaccatactagatcaagctctctggccgtgagccccatgtctgtgggtttgaatgatctagagaggaactgcatgctcaatcagaaccagcaggaagctgagcagggttagaaggctcagtccctctgagagtaggaagagggcatacctcaggagcttgccaagtgcgcagaggtgaaagggaatgtgagagagtctatggggcaggggtgacatttgaacagggaaggatgctgtggcatagatatcaaggctcgaacaggcagctccccctgtacgccaggcattaactggattggtagctggattgcgaagaggtccaggagccctggaaggagggccacaaggtggaagattctcggtgagcatagggcagtggccactaaccaactggttccaaagtgttttaatgatgtaagtgcttagttaaatattaaatgctttattacacatactaactcagtaacttttacaaataacccggaagttagattttgttaatatctccatttcacaaatgttgaaactgaggcactgagtgattaagaaacttctctaaaattgtagctagaaagtggcacggctggactggaaccatctgtttaactttgaaggctgtgctcttaattacaaggtgacttttgtctccttatgcaaatcgcctgttactgtctctgcaggttgatctaggctggccactagaaatagttcacttcaaaatgatgacatggaggtgactgaatggggtgggtcatatggtacagccgtgatcatctgtccctgaggtcctaaaatggagtatggtgagatgtttatgcttttgaaccttcatgaacttttccgctcttccttgggccaaattccaaggtccaggacttggaggaagggaagtagaaacccactcgcctcctcaggaccctgcctggctacatgaaacccccattaatcacctctgacgcccgggcttggtctgtgaaggaacgtgggccgtatggcagtgatgggaggaggctgagatagtgctgaagatgcacagcctctgtgttccatttagaaccgctgaagctccccaggtgcaccaggagccttcccaagacctggatccgctgcaaggtgatagccgtggcttggttgtctgtgggtggagccgaggaaggcagaggtgtgcgtgtgtgtctctgtgtgtgtcatctctgtgtgtgtctgtgtgtgtctctgtctgtgcatctctcgtatgtgcctgtgtctctatgtaatgtgtttgtgtgtacatttctgtgtgtctgtgtgtctttgtaatgtgtgtgtgtgcctatgtatgtctctgtgtttgtgtgtttgtgtgtctatgtctgtgtttgggcaagactgtgttccacccccttccccaggcttgggacaagctcacattccacaggtcctagaggaaatgtttttgctgtccagggctttgggacaatgggcttgctatgttttaaattttgggccccaggaagagagttgcccctgtgttaggatggctgtggctcagtcacatactcccccatttctcttagccggccccagtgtgtgtcctgggggcgtagtcactgcccttccaagcctggagaatgactgcatcgtccaccgtgatgaagtacaggctttgccagggcttagcagggggaattggaaggccttaaaaggaacatttagaaatcaggagtcaaacgtgacttggacattaaaacttgattttgcatccagctcatgataagcatatagcagcatatacacaaatacatacaaagcagtgtgtatgtggcaatcatttggtgcctcactcacctccaaggcttgttaggggtgccatgatttgaaccatctcacctctgcatttttgctggtgtctccctcttctcagaatgctagtcctttgtataaccctttccactggctggggccacagaccttacaggactaagaggccatctgaccccctttcaatgagtagggtgctcctctttgtgtaggatcacaccgcagttttagcctgtctgaactcttgttataattctttgctcccctatgttcctggagggcagagaccaagccttgctccttgtactacctccaagggtatgtgagcctgccatgtgtatgcagctagcatctgaatggatgaatgaatgaacaaatgcaccctttctcacctccccacgaacactgcactttccccacatctgtcagtgaggaatgaactaagtgagatgtaccagcacccatggttgcctgtcttcccgatcatacggtttacatttgcagttcagcatccagtgctgtgtgctaggtacatccacagcatcacagtttcatttcatgctgctgacaactgtttaaacttatcctttctggagggagatggggaaaggaaattaggctccacatttgtaccagtaaaaagcttcaagagagatcctgagtgcagcgggctgaggatcacagaagttggcaggctctaggcctgatgctcatagggtggtatcccagggcttcctctgacccagtcagtaggaacaccgctccaggaccagagaatcctagaggacaggagcccaggacccgtgggggccagtctcatagctcctgcctttgggatttgtgggagggtttgccttatgggattccattctctgagctccatccatgtggccaggccctatgccctttttgcctgactcatgcctgagcttggacactaaaccagacctgcccagtgatgtccctggccagcttctacaggaggacacatccccacattgggagcaggtcccagactcaggtcttgccctttctctgtccccaccagctccaaggggctgtgcacttggtaggctgttggagtatcacaccagattccagaagaggggccaggagcgggaggattatgccctggggccattctcaccggactgttggaaacagtctttggtacctgctgagagagccagtgccagctgggaaatctgtgaggtctccctgaggaagcttgtcctagaaactgcagtgaggtgactgtgcggcaggcccactctcaactcgaggggagcccctcctgcctgctgcaggagtgggagcgtggggctagctgccagtgggatggccccagccggaggagctgggcagtgcagcgaggcgccagctgtgcctgactcctgaggccttctgctcaccggaaggggggcaggtctgcagcccctcccccactgcagggccaggacaggccgtcctgagtgctggccctgaggatctagaccctttggatcctatgtgcgggggacttcccaagagctcccggcccacgactgagtcacgcggcttcttagcaacttagtcaatccaaacgtggaggtgattggcatatgtaagaaccccctttcccgttggcgtgtatggtgtcttctcgctgagccacagcacctggtttagggctacaaatagtctccccgagggaatgggctcatacgccgggtgggcaaggatttcaagtcgtcggcacaagaagagacactatattaaggcctggttatgtttagaagccgtccagagaatgtttggcatgctgaatataaactcatgcttccgtctgctgccacactttaagatttctcccagagggacccagagtgtggggcgccctggagaaggagctgggaatgtctcgggggaaaggttccttcctcgggaactgggtggcatgggagagtagcttcaagcttgctcatggctggacttcccagacacagggtggggctgttggatgttacccgtcatgtcagcattcagagcccggcaggaaaaagcctccttcaaagtgaacccaattcctaaagtcctccttaatggaattcctcttagaggcaggcatcgactggctaactggtatgatactttggagttcagttagcccagaatggtgaagaaaatggctgtcacccaaaacacactgaattgaaggacggtggtgccagaaaagactgtgggttatcttatccagccccttcatctataacatggggaaactgaggcctaatagaggatggtgacctgctctactgatggcattcagcactacaccaaggtcacgggaggggtctgctctaatagcatgttcccatggactggaaaacgtcagaagggtagaatacaatacaaacaccgttaggactgagatgtggccagcatgaagtcccatggtcctgtgtgagtggaaccttggtgtggaaagtggcccctggcagcgttgggacatagagcagtttgggtggggttctaactgggtatggaatttcaacagactcgcagggagattctctagtactgtctcaattggaatcatcgttttttttaaagttaagaagaaaaatggaagggctcaggtgaaataaacattttacaagcagatgcttgcctctgccagcctgggggcattttgagtaggggcgcagcatgcaaagcagagaagagctcccacgtctgccccctgccctcctcccctctggaattttagcccctgcttggcattgccatgggtgtgaaaggtggtgtctggactcaggaggaaggtactgcagagggtaggaagagctctgcagtggtcccacggatctggctttaaaccaggagctcttgcgagtctggagctacgtgagttctctgagcctctgtttcttcatctgcagaatggggataggatggttgtatgggaggaacgcaccttgcacagtgtctggcacacagcaccctccgaaaggggctctccatgtactaggtgctcaggaaagattgcaatctgactaggagttttgaaatttgtgatttacttagtcttggggaggaaagaagagtcgttttccatggatcagtatgtgtagatgtggttgcagagacagtcagagaaagaaatggagccaggacaaaggggtggccccagcattcacgaaaggtttcagaattcctttttgggtttttggctatgacacccctcttaggagtcatgtttgttcactgtctagtgagaaggtgatcttctagtaacctccttttggggggcctataaggaattccttcttgctgttcgtgccttctctcacaacactagtgtgagaccagagaccccacctcacctccatcaggtgaagatccaaagcagagaggagtccctgactggaccttccccaggggtgggttgtgatgagatgagtgattatcaacactgagtgaggggtggtcatgggccagatgctgctgaagcctttacttcctagcagccttgttaggtaggagactgtgactctcccattttacagatgaggaagttgaggtagtaaacagtcatataacttgcccaagcacacacaaatagtgatgttgctttgatttcagccagacagtctggctccagaatctgtctctttcatctctaagccttttaagtagcagaaagagaaagatcaagggggcaatggggcctgaatgtgtccacaatgatggcaaacagaagaggaagtgtgctgggctgcggggccattgatgcccatgaactgaagagcccgaatgcctggatgatgaatggctggtcaccccctcatatgggcagcagaggctgtcttcaggctcggcggctcagctgccattggcctgaatggagtcctcttttttccaagccctttcccctggacaattgctgagctctgccccctttcgcaggcacctccccatgtcgcaggacaccagagtcttcaggttggaaggaccctggaggtcaccctgtttattcttccacctgactcaggagtcctttgtagccttcttggcaggacctgtcgaatcaagcaaggatgatggagaagcccttggatgtccatctagttgatagaaagttcttgttcataaactcaagccgaaggctgccctggagcagctccagccactggccctagccaggccctctggtctgttccctcgggccccttctgaaggcaatttctgagtgaactgtttcagatactctaatggaagtttcttggccttggccctattgacatttggggatggataattctttcttgtctggggctggcctgtgcatggtaggatgtttagcagtatccctggcctctacccactgggtaccagtagcagtcacgccgtacccccagctgtgatgaccaaaaatgtctccagatactgccaaatgtcccctggggcgaaggtggccgaaatcgcctgggttgatctgctgttctaattctgccttgcccagtgctcagagagcagcccccaccccagcctccgatggccattggctgaagcaaaaccatctcccttcacctggcctctgctgaagcggcctggaataaacaaggcagcggtccccaaggccacttcctggccctggaggtggtctggtttcctcagttgccctgtcagcaatgggtggcatagggcctgccccacccttctgtccttcctctcctcaagggtggctgatgcaggagttgagggaccttagggtccagggcgtggctggcagtggagggatgggttatttctaaggtctttcccacttgtccttccccagggtgtgtctgcagtgatcttctcatttggttggtgtctgccatgctgcagaagggaaaacagcattgcacgcctgtgtcctggcttagggtcatgagagcgtgtttcctcccatgtgggttctgcaggtgcttccttgggctgcccctttccctacccctacccctaaatacatgcccaccacctcttctgcacaccgtgggtctggaaattacccaacaaggagacgggagcaaggaagagacatccccaggctctggaaagtcctgaggacaaagccaggattccggtcttgtcaggttttctgtctgcccagtgcagaagaccttagtaacctgccctgttatctgtgtcctgactcagaaatgtgttggttgaaacgtcaggctttcacccaaaatgcagcacaatcaccctgtccctagagccacaaaaattccctttctctgtttccagtttgttctgtagcagcttggtgtgaagacagacagtctagagcatcatcaggtgagatgctcacctaatgtcccagacctgcactgtgggccttggcagaggcaccgacttgaagacattactttcttctcccactctcctgctcatttgacgaggtctcctaggctgcctaaggttgtcagaaggtctgtatggtgagacctcaattgacaggccctctgaaaatacagttaccctgtaattaaattcttatgctaaaaaaagtcttcatcaatcatacaaaataagctgcctgcatttgatgtgtgtgggttgcaggaagatttggggaaacgtggtcgggtttgaagaccttcacaagacatgccaggtgaattctgtgtcgctgctgtcatcccgccttttccagtaatggcctcctttctttatcttggtggggagatgctggttacccccaaggatgctgaaattagcactgcattatttgttgggggaaatagactctgtggaccgttgagtgtctggcaaagaaaaatgagttcaggactaaccctgacatacctcttggtggggagatgctggttacccccaaggatgctgaattagcactgcattacttgttgggggaaatagactctgtggaccgttgagtgtctggcaaagaaaaatgagttcaggactaaccctgacctacctctttgttgtgatataggatctgaaaaggcccctttgacctccagtgttgccaatctgtaagactggataatgatgtcacactgactttctcagagcagtggcgaggaccaaatcagactctgcaagacaaatgcagtttcaacttatgaagcatacacacaagggactgatggattgttattgtggaagaaaaggggggattgttattttaaggaatcttgtccttaaagtaatcttggttgagcgctccacgtgcaaggcagtgttctgggtgctggggcgaggtcacctgtggaattggcaccgaagcaggtcaggtgggagggagtttagaggaaggccacgtcactctggttgggatgctgggggctgttgtcctggagaaagtggcctcaggctgagtctggcaggtgggtagaatttccacagggagagatgctggcctatgcagaagttctcacccaccctgcaagtctccaaggcctgactcacacagcagagtgagccccccctggtgctgggaaattctgaagcccatggggacaaccttgtccccctggccgtgctcttatcctccctacctgtcccatgccaggagcgcttctatgctgctgccttggaagactgtcctaacaggcggcgctgccgcgctcagcacctgggctgggaagaagagcacttagtttgcctcttggagccctggggctccctgcagcaggaggtggagagggagacgtggagggtctgcttccatcaagtcaaggtccgaagggccccatggaggagacgggtcagcagcctctgcccttggatttgccaagtgccccccattgtgttggggctcagggagaatactccagtttggagggcttcctggaggaagtggagcatgacccgtgcctcaatctagaggagatttgaaggggaggctgtctgggggtgggagagacagtgcaggcccagggctgagatggccagagcctgtttgtgggattctgatgagatggcttggctgaggcagagctgtgtggggagaggcaggggaaggagatcagggcggctgggagcacaccttctggtcccgaatgctgggctgtggtgctgcactgtcctgccatcagcagtgggccttctgtgtgtggcaggatgagacgctagtcatgtttgggtgtgattaatctggccactgtgttcacacaggttagaggaaggagaatctggagacaaatgcctgcccagcgaccactgcagggtcccgggagctgggtgaaagtggcagagctgggaggttgctctgaaatgctgatggggatggagtgggggctgtcgggaaggactggatggagtctgtttttccagaaccccttaacccagtggaagccccgcctttcatgtgggccccgcacagttaggctgcccgagtccctctgtcctcgcaccctcacctggctctcttgcctaagcctgtcacagaagccctgcagagcaggaaacacagagcagaaagccacgcacacagcttgtgtttcctctggcgcctctaggtcgctctgcagccacctgcttggagtggtgataagccaaatctttctttagaggagcgaaaacacagctagccagggctgcagctatgactgcagcctgtagggaaacgccgggaggaacaggagactgttgagaaggggacggagaacctcaccagcagctgaattgaattccatctttgagacccaagagagggaaaatgcctttccgcatgcatgctctcctagctatgcttgtaagaagtgcgtgcttctggttgggagagcccaggaacggagtccatcctttctcctggcctccagggagagcccagacactcctgaccacagactggcttgtaatttggcttttctgagcatggcaagagaatcctgcatgtcacttgggcctgacacctgcttttgccttctccagacacggcaagactggccttgacttctggttccattctcgtttccctgggctgctctccaccttccaggcttagctggagtaaccatttcagagctggtcgtttccccgcagctttagattccattttggtgaggaaatttacattacccaggtgtgcacttgggcaggctgagcgacctgagtgaaatgaagccaaatcctggaggtgcaggtgtgaggatgggtctgggtgtggggtggggtggagggctgaagaaggaggcgtaacattgtgtaaggttggatattaaacctactgcagcaaaaccaactctgcccgcttccccgggtatttatcatgcttaccttctaccgcacacaccgtcagtgtgaactattgcatagaaaagggttttccaacattgccaggtcagagctgattaagctttcacttaagaccaagagtggattaaactttgggatctgccctcctccggagggggagaagctggctgatgttcactgacatgtggctgcatggccacatcagttgttaaatattgagaaacttcagctgtcctgtgtccctgagtgcccatcccccatccaggacctcccacccccccacatttcctcagtggaaggctgctccctggactcatttcggttggtgggtgccaccgtggttcagtattttcagaagttcactgtagcctgcaggttatgccaagtcccttgacactgggtcctcatatttcctgctgctgtattttttccttatgagatagaaatgagacttgtcaaaaccctactgactctgttaggcccagcccaaatgtcactttgtctactaagactgccctggtcacctgtttcttggcccacctgacacttggtttatacctcttttatggaaaattatatttaacttcctattacagctatggcttgcaatgggggcgattttaccacctggggacatttggcagtgtgtggagacagatttggttttcacaactgaaaggggagctactggcatctagcgggtagaggccggggatgctgctgaagagcctacagtagatgggacagccccaccccagagaatgatccagcccaataagtcagcagtgctgagctgagagatctacaagcctccgtgtctgttcagctccttcctgggagctcccagagggcaggacacagctgcttgcatcttgccccaaccctctcctccaggcccgcaacccccaggaaccagggtgagacattgcatttagttggacactcaataaatggggctgaattgaattcatttagttaaatggaatcaaatcgaattgaacctaagctgccctgcagatcgttaggcaaatgcaccaattacctggtgcagtagcttagtctttcctttgcttcacaatcaagaagtggcctccgtgacctagactggggacttagggatgagagtgaaaattgaaaatgcttgcaagctgtggccttgagtggtttcagacacttctcatttattgtgcatcttaatgacacaagtaactctctgaccttcttgtctcaaaagtgatggggccaaaaacagccactgccccaactgtctgttgaggaaggttggaaaagtgcaggactgtccagagtctatactgagaggcagtgtggtatggagctgagctcctcagtgttctcacattggaacccacagagaagatgctcccatctgaactgtatgcccaggaaagggggcaggcaggcggctggctcaggcgctgcccttggccccaaggctgtgggagcagagcctgtcacaccagcagtgcattaggggcacactgtttgtgtgagcactctggtgaggcagaaaaaacatgacctgaagaggcagatgacctctgtgtggccagccccttcaccagcgctagctgtctgaccctgacctgtgggcttgccctcctctgtaaaggggaatagaaattcttccctgcgtccaggcaggggctggacttggtcagcttacgtgcctctccccaaatatactaagtgctctatatgcattgctcccctcccctccacctgcattcccattccacagatgaggccgctggggcacagagagattgtgttgcttgcccagggtcacacagctagtatgcaataatgaccggtttcaaactcagagtccatgccttggccgttctagagtgctgcagcatcctttctgtccacttctcaaaaatgcagcctctgcccatccttccatcctccatggggtcttgaaactcaagcctgctttgcctgggtgtttttaagctatgcttgcaatatgcgcagtcatctctgggctttttatgtgtcactcattgatgagaaccaaaactggacaagattagaagtgaggctttccttctttccaagattggattttctgttccacccagaacaacctgctgttccccagctgcacgccctggtttcaagtaggtctaaaattacaagagaatcaccttgctccaaggaagctggcatctctgtttcctgatgaaagtaggtactagagagtggagctacccagaaaccagggggtggcatgttggccatgtggaggcaaacagagctgtgttttcttttcttggccttcttaaagatgtatctaatttggggcatgttttgtttggttcatcttgtatctggagaggttcttcttttctccctaagtgacatccctcttgagcccacaattccctcttctcaaggtgagtaatcctctctctagctgttcataattgctaattagtgaacaaagaggctaaccaacaaaattagctattgggccagggtttaggattgaaccaaagggtggagaagggctttagtctgcttgttttttatttgtttgggttttttttccttaaaaaaaaaaaaaaaaaaggaatcggccaggcacagtggttcacacctgtaatcccagcactttgggaggctgaggcgggtggatcatctcaggtcagcagttcgagaccagcctggccaacatgcggaaaccccgtctctactaaaaatacaaaaattagccaggcatggtggagggtgcctgtaatcccagctactcaggagcctgaggcaggagaatagcttgaacccaggaggtggaggttacagtgagctgagatcatgccattgctctccagctgggcaacaagagtgaaactcagtctcaaaaaaaaaaaaaaaaaaaaatcgcaacaaaacatacagcccttccccactggtaatttatcataatcgtatctaaagtgttcttacccaacatgttcaccatttgaggaaaagttactgatgattccttatctcatcagctatggaggcctcagaggggttttccaaaggaaatgcctgacctcagcataggatggaagaaggaggtgccgttctccgggagggtgtgtccaccccagcccatctgccaccaggctggcctaaaagaagcggcgtcctcctgtgtgtgtgtgtgtgtgtgtgtgtgtgtgtgtgtgtgtgtgtgtgtgtgtgtgtgtctctttgtcatcttcagcatatccagtgcagaaagagatagaggcattcatattcagcaaatgtttcttggcatgtaattacatcatctctttaaaatctcattacaaccctttccatttattggaccaagagattgaggctaagatttacagacttcctctgggccacacctagtaagtggcagtaacaggaattaactatactctctaaagtcagtggccgtagtgttaggaatttacgactaataaatgccaattctgttgggaagacaaaaattatcatataagaaaggacttgaaagaaaggagaagtgctaaatgacgagtttctaagtgcactaggctttctggaaactgcacaatccaggttaaccgcaagcggtgggcagtttgtgggtgagagaacagtgcgcacgcccacatggctgttctgtgagatcacctcttgggaaatatttagaaactggtgcccactttcccaagtttccagcaaagcctacagtcactgtcctcactggaggtgcagtcagtgttcttctgggcccccgagactgggaaggcagattcttactccatttctgtgcctcttccactgccctctcttccctctgctgccttctccctttccttctgctctttgtagaaaataggtctgcagcagccactgaactttgtctctctttgttctgctcttggtcttacttcccttctttctccttccacctctcctggctgatttttcatatcatccccatgagaaagctttttgccttccttaaaaatcttctcaaaagtgaatttctgcttatggtttaaacagataccattgtcagcaggggtcagtgatgacccacccatctcctacactccttccctttgctctctggttcccacattcgattctgtttcctcccacttgctcggtccttcgggtagtctcagcttgccctgatctctaccacgtgaatggagggaaagctaagccgtccttcctggctttccagtgagccagtgggtggaccttcagcccatagactcaccttcctgcctatgtgagcatccagaaaacttttggggtgtgttaccaaggagacaatggagtatttattgtactaccttccttagactttcttatgcaacctgccctctttcccggattgctgtgatgctgcagggaggtttcttaaattaatcttgtcaaaatagccttcgaatccttttggagcaggatttttttttttttttttaaatctcacaagacacaaactgttcaagggaagaattaggaacaaagacaacttggggactggagagaacttggagagcatttagagaaaagcggggaaatgattgatgggttggaaaataggagcatggatgaatggtgaggggaatggagatgatttaactgggacagagaggctgacaggtgacctagtaataggcttccagtttgtggagggttaggacatggagactggcttcccactaccagggaagaaaagacacttaaagtgggaggtaggggagcctgaggctacaggaagaactccttatcacagggtctgttaattatagcaaggcaggatggatcacaagctcttccaccaagcagtcttcccagacgagagcagcactgggacggtggtagggatttctgtaagtcatccagtgcacagcttcccgatcgcttgtcctcagatagtagcgagatggctgcctcagcatctccagggacacgtagtaaaaaatacaatttcgtgggccctatccagacctcctggtttagagtttctgggaggaaagtccaggtgtctgtattcttaaaacacacacaaacacaccccacccccccccacccccccaccccacacacacacacacacaccccaccccaccaggacaaatgcagaactaactcattgagaaccaagaggctggtgatgtgaggaaagaggaaatgcctcccccggattcctcaggttgctgcctgcagcatcccgctagatcttccactgcccgggagctgctcaggagcccaggccacacctgccctggtggctccgtccagcatccctgctgggtcacttggaatggacgctggggcatcaaagctgccctacagctctgaagaacccctgcgtctctccctaatgacaagggtgctgggaaaaatgctcattccatgtttttatctggacttcaccagcagtcactgaagtcttaggtcacagttctgtggagttttccaacgggtccctcagacaccaccgctgccccacaggggctagaatggaatgagcttgggagtcaagagatgtatctgccttgagcttgagcaggtcattttacctctccccgttgcagtttctttctctggaaaaggagacacccggactggacagtctctgaggtccatccagctctacctttctgtctctactggctgtttgaagaattgcaatgctcgaagagtataaagtagattcagtgtaatatttcgtagtgaagtattttaaattcaatgttttttttttctttgcataacttatcctagggaagttgggaaggatgaggaaaaatatacgaatccactcgtctccagctagctcagcttgtgtgtaggcctgccgttcaccacacacgaccatgcgcaagctctctggtcccttggtggcagcataccaaactacagattctgttctttggcctcagaacagtcttgtgtatgttttaaatgtgtagcttggaatcaacgagtatttttcatggggagactaggaaggttggggggctgggatcattatttcacacacttatttgcttgtttcttgctgaattccagattgcggtggtactttaaaaaaaaaaaaagctccaatatcaattttaattttgcttctaaccttttggaccagccacaccctgacacttaaaaaataataatgaaatgttagtataagaaaaattgctagctgactatcccagccttcctccttagtaactaaacctgatttggggcacattgctacctagactgtaatagactttccagtgtcctgcatggccaggtgagctctggacgatgatagagataaactaaattactgtaggctataatttaaggaagcctcctttaaaaaagtaaggaaaggatccttttttcctttctcccttcctcccttcatttctccttccctcccttctgcctccctccctccttcccagggtgcagttgtaatggctggagttctagcagccactttggaccataagatggaagccaagcattgaggatggcaaagcagaaagctgaaagcctgggacaggatgaccatggggctgccatcccatcccaggactgtctcccttcagacatcttttatgtgagagaaaaataaagccactattatcttttgttttatttatgcagctgcaccaaattctaatgaatccatataagttccaggtgagctggcttagatggtgagaaccaaggtcaaaggcaaagggtagccctgataagcaaatgccactgctgagttgctcagagcagtagacttttgctataacatagcacaggaaaggagagattttggagacagatggagtgtgacgtcgagctctgcctgagaccgactgtgatcttgatcaactgattgtcttgagtctggatttcctaatttgtaaattagagtaataatctccaccccgcaggccattcattggcattagacatcgtatgtattaggtgtcttgtttagtacctagcacacagctggtgcttaaaaatagtggctctgtgtgtacataggcacatggtatgtccccctggccacagacactgtgctatgcgctggggacatacagaggcatacggtgtagccccagctctgagggggcgtgaaggccactgggacatctccagtgttgtagcatggggcccaggtatgcagcctgtgtgtgccttcatgctgtgatgcaggcttgggaatgcatcccaagcctgtgtacagtgccagagattgaaggatcccatcttagactggcacttcttggccttcactcacgtgggcctgtggctcgggatacttcccttctcctttactccttctgaatcctacatgtttttgtggcacgcggaagtccttcctcccccatagacccacccaacctagtctagctaatcctcaacattgcactgagcttatttcaagaccacacagttcaagacaacacttgttctcctgctggggtgcatgtgtgtcctctccagctggaccataatcctcctgaaagcagagccccgttctgatcgttcctttagtgtggaaggcacagtaggcactcagtgttttgatggagaaagctgagttttacagttaagaatatttttttctgcgagggctcagatcaggcctacagccctctctctcctgtggctgcagactgtaatgagggagaatggaaagagagcagggagggatggctcagccccaggtgcacacatggcccagcccagattctaggcccagcgggcatcaggacagctgtgccaggcagacacaggagagccttcctctgacccaggtgtgaactggatgataaaagatggtttctcaccctaaggaaatctctacataaaagaagttccctcatcaaaatcctcccagtggccgtaacaggctgttagtcacatgcaataatggcctggggtgagtaggtatcaggcagctgggctgaactgcctccttccatcaggagtgagctcttgcactcccacatggtcacagtatggccctccagaggaacactcccctcacccaagagccagtcctgcatcctcttgtcccagttgtgccctttccctggctgaccatagcattgtctgctcttggaggttccccgtaaggagacaagctaccttggatggcttcctgatcaggggcctgcttctccctggaaacccaccttgtctcatctcataatatactgaggaggatcttggaaaccactaaaatgatcattcttcccctctccatatcatttctatattcctgcttttggaaactccacatcattttgacctggctcaaccaattaggtagtccactccaaataagttaccaacccgtactcacaaaaccactttcagctgtcggaggagaggtggctatctggcgctgtttgcagatgtctttctcttctgttcttgttgaatccttccccagtttgctggggttcccagtgggggagtgcttccacagtgcccaccccaccccagcctctgcctctccccacccttcctgcttcctgttttctagagcttttttctttctttcccctgaaggtgatctctgtataagaatagccacaatatgtgtgtgggaggtttagcaacataacctggaagatctcttacagcctctggagtcttgatttccttgagtgtcttggactggataatggtgtgtattaaggtttggggtagggggacggtaaagaatacctctgcttcttcttggacctgtcagtgaagcacagtttggaagggagaaggctggggatgttcaaatagtaggcagaccccctgaacaacagtagcaggtgtggtccaaacttactggccggcctgcaggccaggaggccagtgccatcatcccctcgtgcctggtgacgatcagcccttagagctttgagtgccagtttagcagagagggtggactgatccctggtcttctccaaggacagcctaactcatcagtcagcatcccagccccagaccagccccaaggtccactgcatctgatgtgagtcttcagacctaaacgagaggtgaggccggagtgaaggcccacactctccttttagttctcttttttttctccattattggcatgattttgacagtctctaggtgaatgcctataaggacaaaggaaataaatttaaaatgtgaatgcaatagggaaaatgcaatttttacaggcgtctctgagagttggttttcactttaagacctggcagtggcagtaaaagtgcacaccttgtttgaaaggtgcagtgccagtgggagaggctgggagtggaccagacatctatgaaatccacactgttgtagaaacctgtaaacccggtgtggcggcccagtgcagagacttaggatacaaagagagaggaacttaagttatgttgtggaaatgtgacttcttaataccgttcagaaaataggtacagaggcaacagtcccaatcttctgctagaaatttcactcggctaaaagcagaacgtttaaatacactcttgccatgggctgctgagaggtccagctctcaagaagtgggagcagctctagggatggccacgctgggctcacttccgagaaagaggaagagttagttggggtgaggaaatcatggaggagaaagaccagtcatttcggggctcctcgtcctgaaagcagagactgccgtacagaactcagcccacggaggtcagccacagacacctcaggaagcacaaagaagagaacgatcttgtgattccaggagagtctctgaaaagaaggtagttcaagaagagtagaacaagcaggggcttgcagagaatgagaataccacatgggcctctgcggtgaatttaaggcaagaaggagaatgaggaagcaacagcccctgcctgtgagtggcctacaggctagaaacagaacagcagacgctgccacaaaggaattgacccaatgcatttacaaagcattccagtctttcttgtccagctttatcccaagtagtggaagaacctcctgatactttcttaaagcttctgacagtgatctctgtgaaattatggagcgtgtgtaggggccagagaagcgaaacattttgattttctacagctaggaggctgtaggagagtaagctcgatgttaattcctggaagactcttagggtatattctttaaacaatagtgtgtgtgctttcaaaagaaatcggtaattttaggaacatggcaaattaactgaactttcttttattgtaggtctactaggtttagatcaaaagaataccgaagatagtgttgattttattaaggcactgaggggcatctatcatgatttcttttgaaaaatatggagaaatatgttaataattgttaggccaacactggcccaaaaatgcagattaacagattgatgtcagtttggagggaggacttcagttcattgtcatggggctcaggcctagtcagcatgtctaccactggccttcatgaaattgcaaaatagaaacttaacgaatttgttgaagacacaaagttgggagagatgactaatgccatataaataatgcatagaaaacaatatttttaaaatccatgctggtttttaatttaacatgacaggagaccaaatatgcttgatatacttcctaagaacatataaataaagtaccataaatatgccaacaagtttgaaacttccaatcacattgtaaatcaaggggcgctaaagagcaagtggaattcctaccagtgggaatgggtgaattgagaggcatttttctggcctgcactccacgtgtctatccactgacagacccaaagagctggattgttgaataagatgtgattcaggcagaaaaatatgaagacatatgaaaatatgcaaggtctcagaaaataaagcatacatgtcctcctccagagacaatgaatcaattaatttttaatgttccaagtgattgagatgaatgaaaatccaggaccccagcatagtataaaatggaccaatggtgaattgaaaccaattaaatagagctgaggcatcctgagcaagagcacaagctctgggagctgcaaatgagcctcacccctgccacttactaattgtgggactgtgcgagagttatttaacctttctgaacttcactgaacaggtgtgatttctgtgaggattaaatagaaaatgtaggtaaagtgcccaaaattacaactcttatcaactttattagtattatttataaaaataactatgttaactatagttacaaaataaaaattagaatttagttttaaaaataatattttgagaaataacaatataagaaattgcctatataatacaagactaaattggtaatgacaaggaaatattgggtgctggagggaagcaggtgttacatgtattttaaaacttacttgtgttaatgaagggaaccatgagttaaagttttgttttgaactttgtaaattatagaagtttaatttgcaaatgcttttaatacgtataaaggttaaaaatccgggtttcaactttcaaaaactcaagataaaacaaaagtatactctatgacagcagtccccaacctttttggcagcagggaccatttattagtctgttctcacactgttataaagaactacctgagacttagtaatttatgaagaaaagaggtttaattgactcacagttccacaggctgtacaggaagcatggcctggaagcctcaggaaatttacaatcatggcagaaggcaaaggggaagcaggcatgttttatcacagcaaagcaggggagacagagagagagcgcatgcacaaaggggaaagtgctacacactttcaaacaactagatcttgtgagaactcacttactgtcatgagaacagtaaggggaagtccgccccatgattcagtaatgtcccaccaggcccctccaccgacatgtggggattccaatttgagatgagatttgggtgggtacacagagccaaaccatatcacaccagtctcatggaagataatttttccactgactgaagggatgggggcagggttttgggatgaagctgttccacctcagatcatcaggcattagattctcataaagagcatgcaacctagatctctcacatgcgcagttcacaatagtgctcgagctcttatgagaatctaatgctgagaggaggcagaactcagggagtcatgcttgctcacctgtagctcacctgctgcacagccggttcctaacaggtcatggaccggtaccggtccgccattgtggggactggggactcctgctctatgaaacaaaaaatgagaaagtaaacacacagatatccagaagcataaaacaaaatgacagaagtagggttgaacgtttaactatgctaaaatatgtaagtgggttaaacactcttattattaaaagtataagacttacagatgttggttaaaacagaaaatgtatccatattctgtacaggagacactaaaacaaagtgttgcaaaaaggctaaaagtttaattaattaattaggaaacagtatcagaatagatttacaatataaagcagctggtgctataaaatacaaaatttaattaatttacctctggaaatttagaaataaaaaagagcaaaaattaataaggaaacataatagcataagagaatgaatgctattcatagtggtatgctaagaaatttgaaaatcttaattgtaactttctagaaaaatataaatttcaactttagataatttttttcaaaatacagaagaacattaaagttaaaaatttatttaataaaattagcattatcttgacaaagatgtcaccaaaaaagtcttagaataatcttatatatgtacacagatgaaaaaagaaaaatgaaataaaattgaatccattggattcacagttaggtaagacacagccaatgaattcaaggactattcaatgctgggaaatttaatactataatatatcacattggtaagtcaactaaaaaatgcagcatgcaataaaactcaatatccattttaaatacaactcttaaaatactaggaatagaatgacagctaatatgataaagaatgtatctcaaactaacagcaaacatttagtgatgatgtcctggaagcatttcctttaaaatcaagaacaagaaaggaacgtgcactagaaccattgccagtcagcgttgtgaaaggtcgaggggctacaacaaagcaggacgtggaaaggaagagagaaaattatcaatatttgcaaatggtgtgattatagtcctagaaaatctaactgaaaatagttagcattaataaaagggccccagaaacgtgactggatatgacataaatagtttaataatcagtagtttttatgtaccaaaaatgaccatctggaaaataaaatggaaaagaattcctatttacaacaattacaaaacttttaaaatgtgcttagggaaaatattctaaacacatgggactgtatgacaaaattaaatttaactaaaagatatagaagaacagttagaataaatgaaagcatgtcgtatttctataggaaagattgaatatctgaagatgccaaatctttccaaattaattcatgagtttaagaagaaccctaatcaacagcccagggtgtattttctttgtttatattttggtttgggcattgtttgttgttttggtggggagtggaaaggagagtgcttagaaaaataattctagaatttatctggaaaaataaccagaccaaatttaccaagaaagatatgtcatgagcacagtgaggaaaggataagagacggcattcctacagatgaacagaatggtgcgggtaaaggaatccacggacagagctgtgtgaaacaaacaaccaggaaacagcctctagtaatgatatttgttggggcataaaataaaatttttaaaaataaatgtgtccaaaataaccttgtattcaacagcaccattttaaaagtagaaggccagagccataaaataatgcatcagtcaaaggcagaagaaaatttgcatcctcctatgtgtctccaaagtagcatatactgtgtactagaaaacaaaatctgttttcccttacaaaaccagtttaaaattcccctcaatttatgtatggtaaaaataactttaaggtgcttctctaaaaaatgaaactaatatgcagtgcatctgtggctcatgagaacctactatatggtaaaggaagcaaagaagttttaaggaaggtgggcgagggcagggactggattggtaagtatttggaaataaaataactttacatacctttttttttttttgagacaaagtctcgctctgttgcccaggctggagtgcagtggcgcaatcttggctcactgcatcccccacctcccgggttcaagcgattctcctacctcagccttccgagttgctgggattacaggcacatgccactgcaaccagctaattttttttttgtatttttagtagagtcagggtttcaccatgttggccaggctggtcttgaactcctgacctcaggtgatcctcccgccttggcctcccaaagtgctgggattacaggtgtgagccaccacgcccagcctacatacctatcttatacatttagacaaagcaaattacaggtggattcaaatagttaaatgaaagaaaataaaccataagacttgggggaaaaagactatttaactgcctccagaattatggaagactttataaacatgaaagtaatggaggaaggcacaaaagaaaagactgagattcaactcataaaaatagaaaacttttacccacagaaaaattacagaaaattttggaaggcaaacacacactgggaaaatgtttattaaagtggtagacacggggtcaatattgctgctgtataaggagatcttagaaatcaattaaagaaacacatccccattagaaaatttggcaaaggacgtgaacagatttattcacaaaatataaactacaaactggtaaatacattttgatttttaaaatcagcctcactagtaaaatagaaacataaattaaaagaagatgctatttttcacttaataaagtaacacagattaaaaaaatacattagcaataggtgtggtaaaatgggctctcatatactatgatagaaatagaaaaaagttataacctttctggaaacaatttagcaatgcatatcaaggtctttgaaatgttcataccctattaccactaattttccatctaggaatttgggctgaaaaataattagacaaagttttatatttacgtataatgatgttcatttcagctcatgtataacagcaagaaaagaggagagaacctaacatcaaaggggaatgtttaaatgtgttataactcatatgatgagctaataaaacttatgtttttgaagccaacaagttgaaatgctcatttcacattaatagcaggatataaaatatatggacagcatatgaatttgaataaagtttaaaaggaaaataaatatgcatagtatcacatttttgtacagtataaaaataaattcaatagtatcttaataaaaattctgggccaaaactaatgagataaatttagtattagaaatgctaagttatgggctcagcctcaaaaaataggaatgaaagaggactaacttaactattgcatttatgaaaaggatcggggggatttcactgccccaggcttggtgttgtgattgtagtcgaagctgacctgggttgccttggtggcagtctgcggtgtccaggtggggagggggcagtccctatgctctgtacagtcaggctcgtctgctctccaagtttaaagagaagcaaggtgtgtcctcctctcatgttggtcacattcagtgagggaccccaggggaaccatctggaaactgttacataaggaactgcagaaggatctagggatgttttacctggaaacaaggatatttaggggcaatggaatagctgatttcacatacataaagggctacatgaggctgaaaaatcagactaattctgagtagcttcaggaagcagaactagattttgggtaggagtgaaagggagaggcaggttttagagccatgtaaggtgtagtcaggtgttcatcttgcaaaatggtgagctcaccaggacacaaagcatccttgaggagtgaagatgagaggcttcatcgggcagaagttggaatagaaggcatcaaaagacccagccgtaggatttctgcagtcccatcattgactgactggaggcccaggtgggcagaaagaaggcgttgaaggggcatagactcctttggccattggttttcaacctttgctttacaacacaagcacctgaggagcttgttaaaacagtgctggaccccacctccatagtttctgattccgcaggtctcaggtgaggacctgagaatttgcatttctgacaagctctcaagtgatgttgctgctgctaccactggtgctccaggaatcacactttgagaaccatctccttaggtcaagagcaagaaataaggagatattcttaagcccgatggtacagagacctagaaaaaaaatatggcacacaggaagcaagcacatactaaatgacatatggcttttttttttttttttttttttaatctcggactcttggacaatagtgttgaaacttgtggaattaaatcacagactggaggccgttctttccagatccacatttctacctggatgatgggctctgtcaccaggccaaagaaattgatgttgagtattaaaagcctctaaggggagcggatgctgcaattttcttccttcccctcttagatgttcctagatggtggggaagttcattgtcacttagaaattcatgaaggaaatagaatattgctcatggacttcagaatggcccataattagctcttttgggttttgttttgttggttggttgtttatcatttgttgttttactggaccttggaaggagtcttcctcagtgaaacccctcgttataagaacagatagtatatgatgtagacaaccacagatgggacccccaagtttgatgatgtcctcagtgtcctgcagttattccaacaaagatgcacaattcccgtcgtcatctccattcaaagtaaggctcatttatttgagctttcagctgattggtttaggaagagaactgtgtacagcctcccccacatctccccaccccttgctgctctcttcctgagctcactatgtcagtgtgagcagactgtgcgcctaacacaccggagtctgttgccatgacgctggggagaaatctggttcctatagcaacatcaggttgactcgttgcaccttatgacacaggcagatctccagcaggggcttctttgatctccagttaatccaggagagatggacacatgtagtactggaaaatattacattttcccacaacccacctaatcctgcctgcctgcctttcatcctccacattaccaaaataataataataaataaatccgcattccctttttttttttggcaacctgaaaaaataaagcaatggatcactttaatgttctcagcagattaaaacatagtttgagggtcaatccctatcgcctccctttccaaggcccatccatccgttagcctgccccctggcatgttccttgaggcctgtccatctggcctggctggctggtgagaagtcctgtcagcctcaggggtccggggacatgccagtagtgcaatggcagctccctgggcaggcctaagaggccaggggctcgttagcaatggtagcagatggatgcgggggcagccccaggagaggccagcaagtccggtgccgagaagctccttgactcaccatccaaaggaatgcacggtgttggcttctgtatgtcacaaagtgggcagccagcctggggcactcggcacattcctggtctggtctgtggcgggagaagtgacaaggaactggatcgttactgacaggaaagcatctcgttgttctttaaagagactttcagcgaaggaggatccatgattttccccaacccttcatttgagtgcctttcagccttccttggggaaaacatccatatgttttctacttatattacttacttgtcacccctcattcattcagcaaatgctcactgagcttctccatgtggcaggctccgttctagaccctgagcactgaataacacgaacggggtttctcctctcctggcacctacattctcatgggggagacagataataagtaaagaaaatgtcaggaacatgaatatacaatggggagttttgggggaggctgcaaagtgagtggtcggcagaggtctcctgaggtgacactgaggcccgactgccctgaggagcctgccctgggacaagctagagagagggtgtcccaggcagcatgcagaggccagcatggagcgctctgaactgggcagagcaatggggcaggagtttggcgtggattcaggggccgcagctgtagggcttgtgagccaggggagagattggattttaagtgatagatatgggaaccattgaaagtatttcagaagggaaacaacagaattatattcgtatttatgagtttgctccagctgccttaacaaaccctcttcaagcccattttccttttgcctttccattagtggcgattaaaaaaagatatttgccacccttcttaggcttgaaggtgatctgcaagtcaaacctcatgcttttctccagtatcagtaagctcagtcccatttttcctctcttgtgcatgacgaactttgttatgccagccttcaagggatattccgaattcctttttcttagaattctagagccagcgggggccttacagatcactgggtccagtccttattttacagatgaggaaacttggttgccacagtggtcaagggacctggcccacatcacaactccgctagccagggctgggcctctggtgctagaacccagcaccctcttccgccccacaactagtagacagtagactagtagtcttcccacgtgcacgtttacttaccagtgctcattatttcttctcttccttttctgattcatctctctgccttcctctggtcctgtcattcttccctggtatgctggaattttttagtaatggactgttgattgcagtatgtgggaaatttggccataagttttggttctatgtggttttttattgtggtggcaattgtttttgccattttctgctttggtgttatttgtggctcccattggggcctccctaagccctgcttattttcccatgactggggactgggtgttattgttcgtaactcaatattccagccatggcattcaaggccaccaaccctctgcctgtctcaatagcatatcacagcccacgccacattggccttccgtgggccaggcctcagggtgggaactcagccagggtggttttcctactctgaggcattggtagagcggtcagggctccctgctggcttacacccacatagcagctcctaactccacagtttgtcttcccctcttctgtccactccagctcagggccccttagccattcactcagcagacaaagaatactaatagtaggtgataaccactgctgcagggatgacacattagcattaggtgacaaataaaccatctccagtcaacattatccctgctgcatccaaccagcacagccgggaaagcaaacaatgaggcagaagcgcgtttcctcactctgaaaggcatgcatgcactggaagttgggttcattggagagcagggtggcttcacatcgggatctgtggcaggacagcctcagagcttggcagtgttgtctgggaactgggcaatatcaataataaggtgcttccagtgacagtctacgtcttcatctttacaaaagctttcagagataagattattgctccagttttcagatggggaacaaaatgagacaggattagtgattctttcaaggtcagcaggctggggaaagtcagggttggaacatgaacccagtgcagggcgcacttctcacacactgcccttctctctgggcagcagatgtgcatgtgctgagcggctgccaaggagacaggatggttgagactctgcagaagaagggctggcatcttccctgtgctgcctcagtgggacaggttgggctgagatctgcaaggtacaagcagggcttgcttggggttctgatgagaatgatgcccagtgaatgatgcccggtgtcgtggctcagcagaacaggcctggcatgaggctcaggagatgcgtttcctgggtctggcccaccttcggctcctgtggcactgggagtactcttaagtcttagctctctgaacaccaagtgaaggagttagcctggaggtccccaacgttacactcactgataccattctatgatttacaaagctcttccttgatgatcagatgtttcttttccgaggtatttcaacttcccatttatagttagtattgaagtgccacctgtgggttttccaggccgctgtctcttttctttatacatcataccctaaggatgcttattattgctgctgttgttaaatcaagtccttgtcttagtatatgtatcttaacatattgagttagagacagtgcctaacttgacaattctgacagtgttgatataatccatggagagtctttagcccactggttctgcccagagctcactggtaactcaggctctctgcatggcaaagtggaagacgttgaccacaccacttgattgggagctgtcttccttccctgggatgaaaccagtcaggaccttctcacatgggaggagtatcaaagactaaaccaacctagaaacagtccaagaagaaccaaacaacgaagcaagcaaatcaaaacaggggaagaggacaagcagggccccaggcagtttggctggtgcccagcacagggcctggcactaacaagtgtttgagaaacattgagtgaaatgacatggttgctcagtagaaggagcagccatgctcaaggccagagtcgccccttcagtctcagccattgcttggggaagtggtctgtttttgccattagagaacacactgccatggaggacactctagatcagaagtccaggtcggagtcatggctttgtgacctcctgtgtggctttgggcaagccactaaactctgagcctctgtatgtgaggacaagcgcccattcttcttcttattgcagagtcctcataaactacaactggatgatgccccctgagtacctgtgcttgaggaggggggcaaatagcaccgagatggtgtcttacccacctttgtatccccagcatgtggcacagagccctcactcattaggttctcagcaaagatgagtgggtgttcggatggatgcacagcttaggcggacaggtggacgaataaatgtgcaaggaaggttctgggagctgctggcggcaaactttgcttgcttcccaaggattgtcctacctttctgtaataggctagggggctgtgagctgcagtatatttctgctcacaggagccctttcccttggggagctatgtggagggcaagaccaccccaagaaccccaacatgaaaccttaactgggattctgctgctctaggctaagcaatcctacattcttgactagaagagtgtgtcttaggcatacattgctgcacagaaaaccccccacctcctccctgcttcacagagatggggtgaaagatggtggtgccctaagaatgcagaacccctgcgccacacaaagcatgctcgctacgcccactagctggccaggaatggtaggaatcgcagggaccatgatcaggccttttctgctggggccacctgctgctgctgttgtcacgttctgtgctctgccgccatcctctgcgggggtggagccagcatcttggcagccccagggtaataattaggggaggggcagctccccagctggcgtggtatttgaggaggggcctggaggagaaggaagggctgggacacggccaacaaaaggagaaattaaatgggctgtcctgggagcccatagttagcatttaaacaccagcatgagctgtgggtttcactgagcagggctgtgtgtggcctcaatgccctcctctcccggcccccgttctgtttgtgagcacaagctgggaggactctcagcagagccctaagaggtgatgttgtcatgccgaagcccaggattcaggggctttcatgcagtgcaaggacaaacatggcgaacaccacatgcacccagctgcaacagcgctgcacccctgacctactcacagccctcaaggaactcaccgaccagcctagccttacagcggctatcacaggtgtgctgggcccctgacgtcgagggatttagggttttgttttatttgctgtcagcatggttcgcgttgcaatttcgattgtgggaagacagccaggaaatactaaagaaacaccccatacctccttcaccacagccacaggtactgagcattgagcacacgttatatgttctttatctcctccagtctgcactgctcacttaaaaggtggggcgtattatccccgtttcacagctgagtaaagtgaggttcacaagaatgttgtggctggcccaagttcacacagctaatgaggaggggaaaggatgccaagtgagtccgcctggctcctggagctccttctgcttctccatgatttctgaagaacacacgaggcctccctgtgtcctgtgggagaattcactgtctctactacgtgggaaaatgtgaaagaaggtaggcctgagtgctcccgtaagctttggggaatgagagctgagtgaattggccttactaagtgatctggcagtaatctggtggtcttgagcctagaagagggttggggtgagtgtgaagagtatgatcccccgcagagccgagtcatgacttctcttctgccaggagctcactggactcccatacccttctttggactttagtttcttccagtaataatgattataaagtctagaaataatacgattaacaaccacaactgagtaaatacttgggaattagtgaagtgctaggtcttgtgagcagattctagaggtagaaacagccccagaaacacaagctagaaaaagaggaacagcttccaggagagttccaggcatcctaagggaagcacgggcctctgcatgtggatgggttcgaatgccagattccagcacccctctatggcctctgcaatctgcagtcttttaaaactgtttttacattagaacatcacagggttggactgtgccgccacaaaagcgcctgtcttcattacccatgattcctcaaatcatcaaacgtaagcacatagatgccaaccagtgtctacggggtgtaccaagcacaggcccatgggagccatctaccctgtgcgggcaagaggggagcagttgtctatgggaaatttaaaaacaatcataaaattcacagaaagatggtctactttgtattgtcatcatggcctggccattctaaataaggtcggggataaaatactccccgtgggggaagagtgttccctcaccacttcacaggctactaaatcttcattgctctcggccattgcttggttgtccttgttctttttgtttgtttatttgggtccttccttccttccttccttccttccttccttccttcctctctctctttccttctttttttctttccttttcttttctttcctttctttgccaataggccaccgtagtcagtttcatgtgtcttcctggtcaatcccatgtttactgcacaaatttaggtttcttttttgtggtcgcatttaggaaactacctagagaatagtgagaaaccacaggagggaaggagaacagcgagaaaaatactgttttctttttgttgtttactcataaatgtcacagaaatatttcagttcctttttggttttgataagtgcttttttaaaccaagtcctaaatcaagggcctctcttggcaatgtccctttgacagaaccgagggagggtggcagggcagggaggcacaagctgcagaggcacttgtactgtacaattttctgggtcctgactgataaattattgtgcatcttgtgcgtgctctgacatgcagtacaatttgtccatgtaacggtgatgataggctgtcccgggctaataatcatgaaccctttatttagctccttcagccttttagagaaatcttaagtaaccgttcatatccctttatcggttttctcttccacattttagcataagtggaaaaagcttttaaccctgagaattttactcaccctggggctggggacaaggaagaaggcacgttgttaaaagtgtacaggaattggaggatcttgacgctcccgatagaacagctttttcttggtctgcctcctaggagtgtgaggctgtctgggtggtagagattgtccagtccatctctcattttactggtgaggaagggatgcaagccctgagacgtaagtaactggcccatggtcacatggcacagtcatctggaagtgacattgagcttccttcacccattacagagagcctgccatgatgcgggacataataatataaataaagacatggccgggcgcggtggctcacgcctgtaatcccagcactttgggaggccgaggcgggcggatcacgaggtcaggagatcgagaccatcccggctaaaacggtgaaaccccgtctctactaaaaatacaaaaaattagccgggcgtagtggcgggcgcctgtagtcccagctacttgggaggctgaggcaggagaatggcgtgaacccgggaggcggagcttgcagtgagccgagatcccgccactgcactccagcctgggcgacagagcgagactccgtctcaaaaaaaaaaaaaagacataatattaccagctctcctttggcacaggtcccctggttcccatccccacccacgtgatggtcaagtcagcttaagcacgtgttcaacactctgcccaagtggctgggtgtcccttgtatccttttctgtgtccaagttattgatggtagattgtgttctctggaagacagatgtcgtcctggtgtgaattgtttcctgtagcatctgtgtagtctaaccctaacttgcatggtgcttgcatggctatttttggacttggctttgcaagctttaacacgtgacgctgcctgtttctttacaggcacaatcttgcaattgaggtgactaaaaagcagtacctggacaatggtattaggattcaaatatagcttctaaaagattggaacgatagcaagagggcatgcaggcattccatctgtgtgtttaggtggtagcaaggagcattcagttgctctctgtctgcagctgatgtttttcacccctctgggagcccggtactgacctcttctgataaactgggctcttaataggttggttagattcccagtgttcccccatccctctttcatcacatacacaaggggtttgtccaagtgagtatcacaaaggttgttcttggcttaaggctggcacgaaagggctctgccagtgagcaatgttagaattaaagacacaataatactaattaacttccccatgcctgtgatctctgcatttattatttgtgtagagataaagccttaaataacatgactggcctctttgggggccctgcttgggagtgggtggggggcaatgtcctcattacagcacgtaagatggatggtgtcctaaggcagaggcacatcaccaaggatcacctacggaaggtgcaacctccttcccagctggcccgtgtgctttttcccagcagcacgtgggatggggagggggactgaggtgtgtgaaagaagagaagcaatttccagggatgtggccctttgcaaggtctccacgtccatggccatctgccttccaggacctgctgtgaactgtgcagcagacacactcaagctggctgcctgtggttgtgggaagtccctcactcctctgtcctcagttttgtcatctctgaatggaggaagggaggttagatcaggcttccaagagtccttgaagttcctgaaattatatataaaatgtgaatgtgtgtcaggcatttgtcaggagctaaaaggccattgcctgtgattctcagaggtccctgaaccaaaggctaagggccaccaagtgagatgctccccaaggatccatcttcctcttcccgattatgattttagaacttccaaacctaacgtgtgttgtcagctcagacaaactcagcattcaggttgtagagacagatgatggatactcggtcagaaatgccctataaattagctgctttaaaagtattgaccaagtagccttccaggaaagttccccagatatggtggttctggtgttcccacctcatctgcaacagccctgggaagcctggctccttgcctccaggttttcctcgatgtaaggccctccaccccaggacactgtagcaatcctggggctaaccctgaagaccatttccactattgggcagccttggtggtttccttgtcgtagagaactaacccagtttccccagactggctaccttctcatcatctcaccatctctagctttcactcagatagaatgatctcagagcaatcggcagcatttctcatttggaattttactaacaaattaataataatgactttgactatggggatgcttaagaaaatctcccagtccttggaggtatcctgggagaagatagaaacaactctgagaatcagaacatctgggaggattctgcagatggatcccagggacagcccaacaatcagagggccctccttcaaagcaagtgctgcctccagcctggggcagacccatccctctctgtgtcatttgttttcccaaacattcccttcttaaactggggttcatgaagtctatagatggaattccagagggtttatgaacttggagaataactggatctttattatcacaggcttctagccgaaatttctcacggtattccttcgcaagtatagacaacacaccacaatagcattagcagtttctgttactttgtccaccattagaaaccatggatattttcttatcacgttaagatggttgcaaatatctcaaaaatattgtttgctttcaatactacttcaaaattctggtaatccactagattttgttatttaacatattatcaaagaagcatgcatatttgtgtattacaaaattgtctttaaatatttttgatatctatatttcaacataactggctttatttgcaatcctttatttccatttaagaacattattctgagaaggacctacagccatcatgagaaccaccaaaggcagccacagcacaagaagcttacagacttctctaaattggcaattcacatttcaatcctgtgctgcttgtgtctgaatcatatcatagggggagctctgagcttatgtgaacatcgaggctgtgagagacagaaaggagagatgtaggagccaaccttgtgtgtgctgagattcgaaaccagtcatatatcccataagcaaatgttcctgaactggcaaatcccagaatgtattttgccctgggcaccctttacctcctcattaaataagaaaataacccatgagtatttgaaaggaacttgcatcgatgtggaactgactgacttagaatagagctcatccgagatcttgagatgggcttattgacacaaccgcctttcagctgttcttgagagtcccacaggatggggaaagccttggtattagtcactgggatcagagctgggaagctgcttagctctgggctcagcaggctggaccaaggccacttgtaggtaagagaggcagtgttccctaatgcactctagatcagctggaactagtttgtaatcctggattcaagtcccagcactatcattaatgaactgtgtgatccaggcaagtggtttatcagccttctcttccataaaatggggtgctgtgctgtgtaggtgtgcctggcttgtaagcactaaacgagtgtagctattactatgatcatatgcaagcagcacctgtagcatttggaaggctcaggaaaagaagggtgggtgggagcaaaggcaaacaagagcagtggagactaaagcgggttgtctcgtggcgatgcttaacctaggggcctggaatttccccctttgcctggtcttactgtcattggaataatcgtaaccactcctgggtggtaagagatcagcaacatagctgtagttcgttgggtggcaggaatgtgccctttgtccttggtttctaagtaatgatgtcttcatgtccggttgagcgaggggtcagcttcaaccctacgataaaccagtggagttataaatggaaagcctgaattcccagacagaggaggcgatccaatgagacagcagagtaagtagggaattttcactgcctcgtctgcaatgataatgtgaatagcaataataatcatcctaagaaaggattttgtctcagagccaaggcaaggaaaagagccttttcccatgccttgctggggagagctgaacactcaaaccacgtcaaaatagaaggaaccaaaaatacagtgaagtaccctttgccccagtgagaagccagtgcaagacaacgccctgcagaatgggccagagggcagaagaagaggccagggcccagtcctgaatttgtctgttggttctcacttcctcctttaatcatttcagaagagctgttaatgagcaggaaatctaattgattagcatttcatcctggcttccctttctgccaaaggtgctaatgagcagggaaatcacagatcctccgggtgcaaggtacttgagaggttgtgaatgcatttgccacccctacatggagaacctcatctgaacctcagcaaactgataaggaccactctgatttttaaaaccctccagacaagctgccttccttctgtggatcacacaccacccaggttagcagcagtgccaccagaaacactgttgcactcaagttttctcgcaggtgactcatctgcatgctccttggcggagaatcgcgggttactgtactgtctttgtgtaagagttcttcatattctcgaagatgtttgttacatcttgtttctactgtctttcctccaggttacacattgtgcgtctttcaccctttctgtgcaagttgttctttctgaccctaatcaccttatgttgttggatcttactccaagttcatctactttggtcgtggattcggaactgagcctagagtccatgaaggactctagcaagaatgagcacaattagaggtctcctggcaccctgttgttgtctcctttttttctttctaacaaaagcccatggtcagtctctccagttcatgactctttttcaaccccagcctccctttctccgtttgtgtacatgccctatttttcttttcctggtagacaaccctgcacttttccttctctgagcagcaacagtgaaagggaagggaggtggagggagagtaagccacatgggcaacctgcaacctgggtctccagcctcttgcagtcttggtcctcaccgtggcatagtatagtaccagtagaggcactgcagggacagatgaactccatagcaaggcattgcaagaggcctttggagaaattcctttgcaatttgagcaaagcccactccttggcttagcaaatctttttactttttggtctgctagaatttactgcatgcgtagttatccagaaggtacgtctctgtcccattcggctttattagacgccatctggaaaggggctgggagtggtcagcctcagggaggggagccaactgaccgtgaaaggagggagatgagagcgaagtaagcatagtgctcgctccccaaggattgaaactgcctgccccgagctgaagacttacaaagacgtagtccagattcccagagaaaatgaggctttatacccataacaagttgtaatttgagtcaccggggaagttaagaaagtgaaaacatgagcaaatgccagtgtgatggaatcagagtctccatgctggaagagacttcagagggatctgcttgagctccctggctttatagacaggaagaccggccccctcagatgcacacagccaggtactgcacggccgggccagaggcttttctgatgcctgcctccctctcccggcaacggaacctcatcacctagttctgataggaaaaaaaaaaaatgaggtgatcagaaaacaacttcctcaactttctcagtctccaccagcaactaaaattgttcctgtatccccctcaccttatccacttagcacccctacacccaagggcagctaggacccgctgctgtctctccatgacctccctccctctgtagccttaggtaggcccctggcagcttttgcctggaaatttgcaacagtctcttgacgggtccccctgcctccctccattcttagttcacctgtcactctgtggctgcctcacccatctaagaagcaaacctggtaaaattgcttctgtttaaaagtcttgaaatcctgcaatggcctcagtggcccctaggataactataaactccttaacatgggctacaaataggtggttttcacccctgggtgtatattagaatcacctgggatctttttaaaattacccgtgcctgggtctcacccgtagtgactccatagagtgggcctgggtggggccagtggtgtcctacagctggaaccagccccagcgactcaggagaggccatcgcttccaggaatcttatgagtgggttgttaaatgaccattattaaaaattatacaaacttgtaagtaagtacattatgttaaaaacaaaggtaatacatactcaaaagtcaggtttgcctgatgcctttactacctttcgaggtaatttctattgattgtatctgctgggtggaaatactatataatggtgtgctactacacatctcctcccaactctgcagtcagtgacatcccattggtagcttgaaattgaccatggcatgagtatttacatcatagaaattggcaaatgctacaaatcagcccctgccccccaacaagtcattaaacactgatatcactggctgcggctcaggtatttacatgatttttttaaagctcctccggttgattctgatgagcagcagagttgagaagcaccagccaggatctgactctttctgcctcttgagcaagcctcatctcttagaaaaactctcctcttccccccaactttcttcagtcctgccacacacaaccaactgcagtggcccaaacacgagtgccatgttatttctcattctgtgtttttactcctagacacactgattcttctgcctggaatgcctgtcacttccttgtctgcctggcaagcacctgttcatcttccaaaactcagctcagtactttgtcctgtgtgagctcttcctatacctcctccccacacaggttcaccactctgcctctgtgacctgtatgtcttctcattaaagggcttttagaattttatggtgctttctgattatgtgtctctatctccacccccattagacactaagcacccgagggcaagggcgtgccctgtttctctgcatcccagcagggagtgcagcaccagcatagtagatgctcagtccgtgtttactggatggataaatgagctaaaccaggtttcctgactcctggggcagccttcttgccaccccagtcctccacctgacccagcctttctaaaggcaggaagagtaaattactgccattcctgtgatggaccacattctgagcttgctgctgctagacgtggtgtgaagatggttctcacagctcttttaacaataagactttttaaactgactttagttattccaggtttagaattctgtccattcattattcattcaataacatgccaacattattccaggcctagagatgcagtggtgtgcaaggcaggggagggcactttcttcagagcactttcagttaggaggtgactcagatgattaaagaagcaatgactggccgggtgcagtggctcatgcctgtaatctcagcactttaggaggccaaggtgggtgcatcatttgaggtcaggagttcgagaccagcctggccaacttgctgaaatctcggctctactgaaaatacaaaaattagtcaggcgtggtggcaggcgcctgtaatcccagccatccaggaggctgacacaggagaatcgcttgaaaccgggaggcaggggttgcagtgagccgagattgcaccacggcactccagcctgggcgacagatcaagactccatctcaaaaagaaagaaagaaagaaagaaagcaatgactaataagtgaactaagagcgaaagaaagaaagaaagaaagaaagcaatgactaataatgaactaagagctatagcatagaaaatgctaggttccatccagggttagctcctagtctgtggggtttcatgaaggctccccagagtaggtggagccaagggctgacacctgaggcaaagaggaaggtggaaagctgttccctgcaactggaagatcctgtgaaagggctccagggccagagagagctcagcagctgcaaggaacagaaagaagttgccacaaagcctgtgaggagtgacagcagaggggcgagggcaggaggggctttggaagccattttcaggagtctggattctatcctaggagcagtgaaaccccactgaggcataaaaccagggagcccccttaccagatctgtactaagagaacttgcccagatcagtggcccaggagagatgaaactagagagcaggagaccaagccttgagtagggaagaggctgctgcaatggatagaagggaggggtttcagaagcagaatcatgtctcacttatatgtggaatctaaagaaatgaaactcatagaagcagagagtagaaaggtagttgccaggggctggggggctggggaaaatggatttgggtcaaagtatacagagtttctgttgtaaaatgagtaagttctagaaaacaaatgtgcagcatggtaactataattaataaaaatatacacttgaaatttgctcaggaagtaggtcttatgtgttcccaccacatacacacacaatttgctatgtgtggtgggcacatgtaagactatggtgactatgaggtgatggattagttgatcaccttggttgtggtaagcacttcatagtgtataccaatgtcaatcttacatctcaataatatgcagttgttatttgtcaattataccttaataaagctggggaaaaataagagcagaatcatggaacatcatgactggatttgatgatggaggtgagggaagtatgaagaatctgagagaggtagggagagctgatcagttcatggttcatgttgggtttgtggagtttgcagtgcctatgacgtatccaagtgtagttgatcagttcatggtccatgttgggtttgtggagttggcagtgtctgtgacatgtctaagtgcagttgatcagttcgtggttcatctttgggtttgtggagttgacagtgcctatgacatatccaagtgcagttgaccagttcatggttcatctttgggcttgtggagttggcagtgtctgtggcacatccaagtgcagttgatcagttcatggtccatgttgggtttgtggagttggcagtgtctatgacatatccgagtgcagttgtctaggagtcacttagaaattcagttctggaaatttgaggagagatgtgggagagaaatgtagattggggtcatcagtgtatgataactgaaactataggagcaagggtcattcattgtctaggaagaatgactagggtaggaggagaataggacatcacatttaatcaatgaccagcgtagacagagctagtagcagcaatgagatgagtgactagagaggtagagagaaaaccaggaaagtgtggagtcatggaagctaaggaagatggtgttgggaatagaggtggtgaacagagtcccctgttcttgctgataggagaggtcaaatgagataaggacagaggcgtggcctttggattccgagatgtgttgatcaccggtgcacttggcaagcatgccagaggagtgctgaggcagaggtcagagcacactgtgccaagcagtgggaggcaagtgatggagacaagcgtctgaactctaggacactgtgctgggaaggagaggggtgaaagaggacagttttgggatcaagggatatcttctatttttgttgtcatttgttttgaagtaggagaggcaagctggctaaactttaagtaaaagggaagattgtgatcctgtcctctgtgagtgaaagagagcatccttttaatgtgatcagtgccagatgtcatcttacaagccctgtgtctaacctgataggcatttagagtggccaaggcttcctggactggcctcatttcattgatgactgcttttgcagagactccattgcctcctaattgtctacacttggggcctccatttttctcttccttggcagaattttagaagaagcctcctgtcaccagcctttcggagtccccactgatactggtgtgtgtgctcctgctgtggtgctgcccacccaccctcgttcttccaaccctccggcaccgaatccctcctttcactccctctgtcccctgggcaagttccagctggttacagtgaattcccgtatttccctcctctcttacttctcatttgtcagagtgcacaggaggctgcctggaatgccctctactcccaggctgaggaaattaaagtagctaaatttttattatagcatctctcaagaatatttctagaaatcatagagtcgttgcaccttactactgaatagaagttgaggggttatttgacccattccctttaattctaggcagcttgatttccaaactctttgtaggtacgtcttctttaagatttctatataaaaggtcccccaagcccagcccttatgactagggcgaccatgtaattttgcattcaaacagagatgccaaagggggccctgaccaaacaggacttgggaacccaggtatgatctttgggaacaccagaacaacaaccagtgtaaatgaggactgtcctgggctagccaggacatgcagtcatcctgcctgtgatgagtaatgggggacagaacccgagagactcttttttggctagtgcttaacattacgggacagtcactgagcatttactatggattaggcattgttccagacactagaaccgacaacaagatataatccttgccttaaaaaactgttggggaagaaagacacaaataaaatttgccataattctgtgtgataagttttgatttcagttttggtaagtaatagctttatggacgaagtgctttgggaaaaaagcagaagagggatgagtttggaggggttcgagaatcagaggaggtgacaggagagctgggctttgaagatgatcaggatttcttggggaatagggctgcaggagagggaatgtgtgccaagagtgtggaacgaaggcacggtgggtaaaagagagagcaagagctaaagctgagaactggacagggccctgacaggacccattcaccttctggaggcatcattcattctgtgcatttgtgatctctttttgcgtgagtgcaaggtctgaagtggcctgtggcatgctggagcttagtagacacatctggtgaaggtgtggagaaggccagagtaggaaaccactagaagtggagaggtcacctcagagactctccacacagcagtggtggtgtgttgcttctgaaccaaggcagggtcagagaggacagaggaagaggcaaccctaagagagcatttggcagctgagacgataggacgcagtgactgacgtggaaggtgaggaacgcaaaaatgccaagatcacacaagcctgcttcagaagaccaagaagatggggtttcccttcattgagacagggagcaggagagcagctaagtctgacgtcaccaaaggccatttggggcatgtttgggtgtttgtggtgcatccacacggacacgtccattaggagtttgtatctatgggtctggggctcgagggacagattcatgtcagaaatactgactcctcggtgcactgatagaagatgtgattgtagatgagatgactcagagagcaagtgtggagcgagaggacttgggaacccagggttgatttttgggcaacgtctaaccccaaagaaagggcaaccacgaaaggctgttcagaagcagcagtcagcagggtgggagggaaccaagaacaggactgtcagggaagcccggaaggaagcagggtcaagctgggaatgctggatgagcagttttcttgaagttacgggcaggagccatgacagtgggcgggaggcagagaggaggaaacaaggtgtagcctactccttctgagtgcttgaagtggggcaaagacaaggtgtgaagatggagggtgagctggggtttaattgaaagtatttcttttcaggttaatggagttttaaggaagtccctttttacagtgacttctgaaagaacacccactctgtttgccctctagacctgggctatcgaatccactagccactaaccaagtgtggctatttaaatttaaattaattaaaataaataaaatgtaaagttcagttcctcagtggcactggctgtgtatcaggtgctcagctgccacgtggctggtggccaccatgctgcacagcaccggcacagagcgttcccgtgtttgccaggagttccgctggacagccttgttttaaactctgcgtttcaccatcttcctaattctgccttttggaacttagtagagtatataagcccaatctgcttatctagtttccaaacctagttctgaggtgaagaaaaccagatggtatttttatcatataagctgaagaattcttacaattttcaagtcagcattttttccaggcattgaccgataataaattgctccatgttgttaaacataagagagagaaatgtaaacgtgagaattatttctactgagccatctatttagtctttccactgctaccatcataaccacttccatctgatcattagcttttgtgcatctacagtaacttcatttttctatttttttgaaagttatgagctcgttagggaaatttagcaccatagccccttccttccaggaagctgcagaggccctgctatagctttcacctgtctgggcacctaagcagaccttgtcagctgctgggaagaaaaagcatctgatttgccagcccctcgcatgcatccatcagccgggggtgggtttctgagaaaccgttgtgtctgggcccaagctcaaagcacacttttcattcctccctgagctattttccttattattctttagaggggatttgtcatggggtgatttggtgtctccaagatacctgggtttaaaaaggtcctttgcattattctgcatacagcgggacctgaacttgggctggaggaatgttgctgatgcccaggtgggaggcagaggattgtacctgagaacttttcctgtggcctttacctgggggaggagagcatgttggcagaatgttctcagggctggccccatcgcacatggatgtgttcatggatgagttcagcagaagtatggcagctagggagcttttctttatgtccatctgggctttgctatttggctgaaattcctggaccaatccttgtgtccgtaagaaccctgtgtccttaccttgtgtagactgttgactactgttaaccctctagtattagcacagcaaagtactgtcgtgcacttcaagcccctgtacaaacacatgcccctcagccagacctcaccctgggagctgctccggagtcaacagcccttgaaagtgcactgtcctgcctcgtagctggaagctaaggctgcagcttcatctcccatggaaacctgggctcactaggaggggcaaggcctccagaccactgtcttaccatagaagccgcctagcaaactgcaaaccaagcagaaaatgcaggctgggctgaggaggcctctaactgatcaccagccaagcagagaaggggtgagtggcatgtgaatgactgctagctctaggcctggaccatggattcaaaccctgctggctggccctccaccatctcctgctccagtgaagactgtggcatccattagtgaggctagagtacacgcttctgactgtggaatccttctcattttctggctctgccatccactagctgtgtaactttgggcaagtgtggcctgacagccgaaagcttacccccactccttgctagctatatagctgagggcaagccatagaacttctccgagcctctgtttctagtctgcaaaagaggataaaaatacttactgtgcaggttgttgcagagatgaaatgatgtttatcaaatgcctaacacaaaggttctgtagatgctgcttctctattctctctggtttaaatccttggcaggtactcgttttcttactaagaaggttataagatcaaaatttcttattttagggaagtaaaactcaggaaagggtttacatctctgaattaggctgaaaagggacactggggattggtcgtggaggctcactcctgtaattccagcactttgggaggctaaggtgggaggatcatgggaggctaggagttcaagaccagcccgggcaacatagccagatcccatctctacatgtctacaaaaattaatataaaaattacctgtgtcatgggcctgtagtcccagctacaggctaaagcaggaggatctcttgagcctaggaggtcgaggctgcagtgagctatgattgtgccactgcactgcagcctgggcaacagagcaagaccctgtctctaaacaaaaaaaaaaaaaaaaggaaaaggagggacactggagaagaagctccacaattttccaaggtgccagggtgaaccagcacgggccaggcggaggcctgtcgtctgcactcccacatggccctcctcctactcctgatgtggcttctctctggtatggacgcaggagctggtccctggcccacaggagaaacttggacacagccatgataaacgcaggctttataatccaagagcttgaaaagataagagtgactaataaataaaaatttctccatttcttcatgcttgattttcaagggaagatgtagaataaatttgagccaccttcccctgcaagtatacctttaaatattaaatattttacttaattataaaatcccctgctgtctggagagaatggccaccttctctccttagtggaaacgatgtcatcgcatttactgagtttgtgaatgtaaagtgttttcagactgtaaaaccctggatggggttctggaaggcctcctctctgggcccatccaaaggggtcttcagaagtgcattggtgacaagaatggcatcaagtaggaagggccccaggtgtagagggatgggcagtggacacctctgtcaggaagagtcttccttatccagggctatcaggatcaggagctagagcccacgtttggagaaaacacaagaagtagtaccaacccagtgagtctcgggtaagaaattggagtggtttggtttcccatctctaacttggccagatgtaccataagctgtatctgcaaagccagtgtaaggctagacttaagttcaattaggatccaaattcttcactgtcaacttgtctaagtttttgtttatttcacttagtttcctagtgaaattttcatttgaaaattcccagccttatttatttatttatttacttattttaatagagacaggatctcactctgttgcccaggctggagtgtagtagcacagtcatagctcactgcagcctcgacctcccaggctcaaatgatttcctgcctcagcctccagagtagctgggactacaggcaggaagcactgtgcctgcactccagccttcttttcttttctctagctttttttttttttttttttaaatatttgagacagagtcttgctttgttgcccaggctgaagtgcaatgacatgatctcagctcattgcaacctccgccttcttggttgaagagattcccctgcctcagcctcccaagtagctggaaacacaggtgtgcaccaccatgctcagctaattcttgtatttttagtaaagatggggttttgccatgttgaccaggctggtctcgaactcctggcctcatgtgatccatccaccttggcctctcaaagtgaccagccttattttaactgaataaagggaaaggggctttttttttcatgaccctgaagacagagggactcagtgcgcccccagtggccagaggctgtagttacagggaaagcaagtcgggtccctctgagcctctggaagagccaagtggctggctgctggaaccatccaggagaaaccagattttccaggctagagctgtttcctttttccagtctgaggcttcccatgtattcctttcaacgcagcacctctatgtgcatccctgaaccctatgatctgagaaaaggtagccgaacccccgactttctcttttgcattgacattagcacagatctgagccacatgagtagttgctcataccattatctgcctttggttgagaaattagaaggtgctaggcacaaacacacgtcatcttatttaatctttacaagccaggatccggtactagggtccccagtgttcagagggattaatttgtcaagatctcacagtgagtagattccagtctacctcactggagcctggtgcccgtccccatggtctgcactcctggtgttgaacctcagcaggggctgtccctggcctgctgaaacagttcagctgaccaggaagtgtgtgtgcgtggtgtcttttgtacagtctcagcccctgggtctgacactctgatggtcttttagggtgctgggttatttcctggggttctatctgtgccaagttgtgtatctttcagtgacacacatctgttcaagccttctgagttggggagcaacagaaagaggtgaagagagaaagcactctgggaaacatggaaatatttttgcagcctgattgtctctgcatgcaacactagcaaagctgtttctgctccctttcggtgtccgagtcaaggggacgaagaggcctgcccaagaagaagagggatgatttttctctttctgtggttgggggcagaaaggcgatccggctgcccaagtggttcaggtcaggcttaactcggtctgtggcctctggcctggggaatgtgctgagctttgattcagctaagcagtggcttgttgcccaggcctgtggtcctccaaaacaccagctgaggatcccaaaacttagggcccttgtgaacagggtgagttgttgtcaccaggacttgccttgtcaccacctattacattttctggggacccagcagcccctggcctatggccacacagcaggcgcctcttggccaagagctctggcatgaagctaggcctctccaactatttaatgtttcattagcggttttctaaaggcatggggccaagcctggccgagccacaccattcagaagtacgtgaacacttcataaaaccaaactgttgaaggatcccaaacccaggaatctggtcacttggagtccaggctggaggcccagggcaggctgctgcactgtctcagctctttcttggtctggatacttctgggccacacatctgtctctcaaactgtttagcctgttagtagttctaaactaacttctaaatagtttatatttggggttcaccaacctgttttcatatctgatgaaagctttggacttgccccagaaagagacatccatgcacatatgtacaacattgtgcttagaattgcaaggtattcacaagccacactctaaagatcatcagtggatccaagtggagaacccctgtgctaaaccacacttgcttccacacttaaactctggggactgtggagtgttatccatcaagaagagtaaacaggtattgggttttgttttgtttggctttttgcttgtgtcttggattttgaatcgaagtccttgagtggtagaatgggggctagatcattagaatcactccagacttcacaggtaagagtgggagctcagttgagtgacaggcccatcccagacacaaagtcactccagggcaattattcagagcccccaggagctttcacgctctaggagcaagtcaggtaagcagcagcaacacacgtgccgcggaggcggcacctacattcagactctcattgctcttgattgactgggtggccctggaccagtccagagtccacggctctggaaatggtaatcaggcttgtggttgcaggggaatttatgtgtaccaagtgactggcacaaaacagaggcccaatacactcaatgctggcagatgatagacacagtggagcagcaaagctggtgaggatggaaacaccccatcacctgtgagtgggattagagcgtctgcagagggcatcctgctggcttcccaagccatgagccttctgataaatcttactgctctgtcagagcctctgatttaggggtagggaggggcagtcaggagaaagcatagttagctctcgggcagctagctgtggcagacagcgtgctttgtccctcagatgagtcacaacaagcgcccttggcaggcaggaaggactttgaagtgtggtgccccaaagggctggtccaggaggcccctgcctagcccctgggcctgtcactcctgaatctccatcactggcccgagggcaggcccaggcttgaaataaactcaggccaagctggaggcgcaattagaaggaagagagccatttggctttttccaaaaggtaagaaggaggacttctcatttttgtgctttaaatatcaatgcactcttttgatgccattatttgcattttctgagttccactgttcttgggcaaaatccaatagcccagctctgaaggcctcttccacatacgtgcccctcccctggagaatccctcacaccttctttgagctaccaggccaagaaaattgtattgagctttacctcgtgaagtttgcattttaaaagcaagatgtgttttttcatctctaaatataaagttttcacattgaataagcttttccaaactatatgcccttcatctggatactctgtggaagcaaagggcagcatggctgggtggtgctgagtcgggcagagctctggtctgtgcatcgggagactggccactcaccagatgacttctgggagccaccattccttatctgaaagctggacagctgggggcctccataccttacatcctgcccaccttccacagagttgtcatcattgactgagttatgtctagagaagcactttgaaatgcttctccagcattccaggtcagaacagggtggcctaccccacccaaagctgcagaaagagaggggagcgtgggtccaggggagaggatgtgtggggtctaaagatgcccaagacagttcctggtgagacagcccaaaggaggcagcaggctagaaacttgcagaggaacaaggaagctgtgacaccttcttacctggggacctcaggacaggaagaaatcatgaaacattcttactgggaaagccagaggagctttcctagtatttttgttattggtaacagctgtgaggtgccccctcagtgccctggcaactgtcattgtcacagaccccaggaacatggggctttgggtacagtttgaccctctccctgagatggaagatctcccttaacacctccccccggggacttgagacaggggtggctcctttgctcggctgctgcactctaaccctttgtgggaaggggagcatgcaggtgagtgggtgcaggaggcagggcaagtgctcttgggctttggcaggaatgaaccccatacctgcccacaacaatgtctagtggttgcctgtgacctctagagcctcagagggtgtgagttacaaacagtgctcctttagtattttccatccgtggatgactaaatgttaaaccaggtcagtggaggatcagggcgacagccttttaccccctgtcctcttggtgcctgggttcttgtccgggatctaggaagaatcaggtcacacagatgtgaaggatggtgaatgcaaagattttattgagtggtggaaatagctctcagtaggatggggagcttgaaaggggatggagtgggaagataatcttcctctggagttcagccatcctcagccaaattcctgtccaaccatccccggctgaactcctctctgaccatagtctctgatgtccagctgcctcttctcctctcaatgttcagacacctcttctcttctctccttctctgccacgctgctctgctcctctgccagcggagcttggggttttcatgggagcatggtgagccaaaaggcaacatttgggcaggaaaacagggatgtgaagttttcatttagggccatgggtccaggcttgggggtggaacccttgccagggaccccactcttttcttccctgcctcctggccatatcatccccatgggtttactgcatcttattaaagaactactcacaatgacctcagatcattaataactcagcatctgaactctgacttcctgtctcctgctttttggatatattaatgccaatgtgtctgcctgtatgcaccaggggtttgattcccccttgcaaggtttttaggagatttagacagtgagtcttacaacagctgtgcccagtttttaaagatctcgcctcctggaggtgaaagcaaggggggtgtattcctaaaactatatcaccaacagtgtgaagggcctggtactttgcattatctcatttattcctcactacaccaccatggtgtggataatattaaatccattttacacagctaagaactgaggctcgggaaagttaaataacatggatcactggtggaccaggactcaactccagcctgtggagctctagaaaccaggtcattccttcgtgccctattgcctctctctgaatgcaaaggctaaagcagagtgaggaactcagcaatgagtaatggctcattgtgaagtggactccaggtggtgcctacggggcaggggcttatgtgcccataactgactccatctacctaccaagttctcattagggtcaaagcatgcgatcagagtcagaggctgggtttgagaacctgctccttttaccgaataatttcatccccatgctgtacgagcaaacttgactttgctgaccttatctgtagcatgaaaacccacacagggctgctacgaatacagaacgagataatgcaaataacgtgcttagcatggcatcttctctgaacacctcaggttggcttagggtctcccattctgtgcccccacagcactctctgcctcccttgaagcattcttccctcttatttatccatctgcttccaagctacctaatctcaggggccccatctggcctgctcaccactgagtgcacggccctgacagtgcctgacacctgggcagagatgtacacctctaatgctgatctgctgactggtgaccacggaaggaggcacagcagctacagctattgttactgcttccttcctcccccaaatatacttgatgcttcagtggcatctccctcctgccctccccatgccaggcacctccatcctcatcctctgagccttttctcccaagtccccttctcccaagtccccttctccccactgccctcagaccccctccccatctcggcctagaagccccccaaggcttggtcctcccttcagtctctcccagctcctgcccacagccttctcagaataactggatggctcttagtgacacctcagggtctggaagaggccagaattattctgatactactgcatgtatgtttttgagtctccagtccttgttggtgtgctgggcctctgtggcaggggtgggaacctgtgtcccctgccccctgcccaggcccagtgccaggctgcgcacagaggaggcttcaggatgagtctgttgggcagcagccagggtgcccacagttaagtttcaagggaggacttcagctgcacctttaaagaaaaaaattattatgctcacattcatttcacacccttgtgacaaaggacacatttccacgacctcatctgatcatcatcaaccaacctatgaggtcagcaggtaggacaggtctcccctttgaacagatggggaaacttagtcacagagtataacattatagagctagcagacaggagagcaaccacagatctgggtggggcatccatgatggtcaagaacaaacccgagagccagactggctggtgtgattcccagctcttccacttatagctttgtttccttggcaaattacttaacctccctatgcctcagttttcccttctttaaaatggacataatacttagttcataggctcattatgaggaataagtgagttatgatcttcaaagcaagtattaactgattacgtgcctggcagctagtaagcactgaatgttgtaaaataatgcaacctagacatgcatatggagttctttacactatgtcctctccttttgtacacttctgaacacatccacaatgagaaggaagggagtaaagtgtcacctatttttctgttacttaaggaaggctctagatatggcatgagcctctgacaatgggatgaggacctcattctttaaaactttcgttaaacatggtgaatttcctttatacatgaacattgtaggttcatgcctcttggcagagaagatgaatacaagctgaattacagtatctcaataagatggcagtgtttattgcaaatgctgcaacatcctgcttgagaaaactttgatttgtagtctggttctatgactccaccaaagctagacaattatccaagcagcacctgacctttttgactgtttatcttattggctggcagtggtccaggcctttaatattatgcttctcctcttgttcctggagctttgagaaagataatgaaatgagttgagcgccacgtgcaacgtggctggctaggagactctgctggatagtgcaattggaagggacacctccgtgtgcttccaggggcctgggccagacctgactgggagctctagagaacagaagcccaccagctggaagaggcaggcaggaggtggcactgcaggcggtgtgaatgtgaacagcaaagggtttgctgtcccaggcctcactctgccacttgctgctgtgtgaccctaagcaaagcctttaacctctctgagtctcagtagtcctatctgtgaaatgagaattttaatgctggctctgacgacttcacatgtgaaactgacctataaatcttcaagtgcacactgatgttgttgtaatctggagataagcagcaatctactagcaatagccttgcatcgccattcagctttcatcctccgaaccagacttgtaggcccccagtgccagtgggagccctggtggtctggtctcacggtcaacaggaaggtctgctgtgccaccgccaccaccactagaacatcgctcccttcaaggatttattccttaggttatgatttaagccatatcaattataataccttaggaataataggtccattaatttttttcctacctatttgaccctctgctatgagcaaggttatttgctttgttttgcttttgtttttgggtagggatgcgagctgaaagagatagacagatcatgaggatcttcaagttaggggcattagaatagcactgtggggcagggcagagggacttgtgtgtgtaggcagcagcacacagatacggggctaggacgtaggcctggagtgatgagggtcaaccacagtcttcccaacatttcctggaggtcaacctgcttttaacagccttcattcttttccaactagtgtctcgctgccctgccccaaaatcaaggtgaagcagatactactccaggccaaagacacatctcctatgactgaccttctggtcttggccacacagctgactagctgcttgtgtcattggacgagtgacttcccctcttgtgtcaaggtgcgctgcagagggatggcgttggaggcaggagtgagcgcggagctgtgaggacccagggaggagggtttagaagtcaaggaggaagctgcaggcacgtgactcctgcactggcctcacctctcaccagctctgcaaggcccggagctgccatcccaaggctgcttttcctttcctttctttttttaaaattctttaattaaacttttttgattaagtgacagcttttaccactcctggcagctgctgcgagacaagataatttatagatgcattgacactatatgattaggaaagtacagtaaataacagatgagaagatgactcgtgcaacctgcagggcccctcctccatctctccagtccagcccccaccatctcccagtgagccccaggtagacgtctgccacatcactcaggggctgcgtggagcactcggtgcctttcccaccacaagatgacgaagatgtggtgttgacagactgctggtgtccgtggaccacagctctgctctggggccccagggactttctcagagatgcctgtttccacctagaggaaagacttaatgattctcacccttgaaagtgtgtacagaaatcctctagtcagaatgtccttgctgtgtaccagggcacactgtgggctccgtccagccaggcagggcctggactcaggatcccctaggctggtcacctctggttgtgggcgcttcatccatttccctgtggatgccataaaagcactgtccctttctctgtgtgccacactatggaaaaggttgagaatcaccgctagtccactccggggcctgtagcaaggagagtaattgaagtgccccgggaaactcgagccgtgtccttagctcttcagcactgccggagccccatgctcctcaggaatgagcccctggccttttcctcacagtaactaagagcgctcatgggggcagcctagcctgtctttctgggtgaagcacatctcctcctgtcctcttgtctaccctaacattccacgtgttcctttctcagggtaaaggccaccctcttcttaggagccccgcacccaagccaggcattttgcatgggaagcagtgccctgtgtacttacaatcagtattgtctaggcaagattaaatcagtgacattcaaccgtatacaatcctgcatgatcagacgatttgttggaaggcaggattcgagttcctctcagaagctggcttgctgtgcacgcctctcctaacatggactctcctcaagtgcccaggcagaaagcggccagctcccagccagatgcatggggggccctgggttccagaagatcaagtggccaagcacatgaagacaaatagtttgtctcgtcagcttctgggggtcacttgttcacatgggaagaaaccaagcagtggaggttaccatagaaagattacacagccaaagtttgtggctggattttttttgtggcttttctttgtgaagagttaagcatgaaggaccgagggtatccaggaagaagagtagctttgggattatcaggaaggatccacgtacatgtttctgacttcttctcaaattgcctggagcagtgcacaggacatagtagatctttccataaacactgctaaactgcacaaggaacttattctgttaagggagctccctacctctgtttccccacctgacaggcatgctagtttagactccttcgaggataactcggctactccctgtgggatatctggaaagaatacggacgggatatagatacattctactgatccaagtcactttaaattttttaaaaattttaaataattataggttcataggaagtttcaaaggtagcacagaggcagtgcccttcacccagtttcccccaatagtcacaccatatgtacataacgatggcacagtatcaaaaccaggaaactgactttggaacaacgtgcatgtatagttctgtgttgttttatcatatgtaggttcatgtgaccactgccgcagatgcagaacagttccttcgctatggagatcttccccgtgtgcacatttagacacacccacccttcctcctcatcatccctaacccctggcaactacttatttgttctccatctctataattttgtcatttcaagaatgttatataaatggcttttcttgcgtttctgtggattcgttgaacattttttagaactccatttttatctacctctagtgtttttgagtatatctcttcgtgtagctgttttgtggttgctctaagtattacattatatatacataatttatcagtctactggtactacttttttccagcccaaatgaagtgtgtctgtctcacttttatcctcacccatttatgatagaattgccttaggtatttcctccacacacatgagaaatgcatgtgttacgatttttgcttcaactgtcaaaatttagaaaactctagaggagacagaaagtgtattcatttgcccatattcttgctctttctgttcttccttacttcctgataacccaagattccttaaaaaaatcatttcctttctgcttagagaacttccttttgccattcttttagtgtaggtctgttggtgaccaagtctattagttttctttcatctgtgaaaatacctttatttccccttcatttgtgaagaatatttgcactggatatataatttggttgacactttccttcattaggcacttgcaaaatggtatgctacctctttctaatactcctggtttctgatgagaaatatgctgtcatttgaattattttcccccctgggcaaggtgacatttcccttgcactactctcaagatattttctttgactttggttttcaagggtttgactgtgatatatcttggtgtggatttctttgggcttatcctattttggcttcactgagcttcttgaatctgtaggtttatgtcttttgctaagaaattttcagccattatttctttgagtactttttcagccccatcctcctctttctctccttctggaactctgatgacatggatgttagagcatttgttataatcccacaggccacccaactctgctcactttttaaagattattttctctccattccttatattaggtaatttctattattctaccttcaagttcattgattccttccttcgttgtctataatctactattgagcccattcattgagttttgaaatttcatttattgttctttttacttttaaaatgttcatttagccttctttatgtcttccatttttttactgaggctctgtttctttgctgagactttctgcatttccacggtttcaagcctgcttgtaattgcttgttgcagcattttacagtagccacctaaacatttttgtcagataattctaacatctgggttatctcagtgctagtgtcatccaagtgccttttctcattcaagttggtgctttcctgttcttggtatgaggaatgatttccaattggaacctggatgttctgggtattatgcagctccggatgttatctgaagccttcccttacagctgctttcctttgccactgacccagcagggaggagggatgccaccatcttgctattccagtaagggtggaagtcaggttcccactcggcccccatcagcactcagtgaggcagggcctcctcattactgctggcgtggctcaggctcactgccagacctctgctgataccaccctggctggaggcagaggggagcctcgttactgcctcaccgacaccgcagcgagggagaggcctcattaccacatggtgaatgtcctggcgctcccttagacctcctctgacaccacttcggcagggaaaggggggcacacctcattactgcctagttggggtggaagttcagttttctcacatcgtctccaccgacaccatgtgggtactggggagcctcatcatgacccagtgggaaggaacgtccttttgataatagccgtcctgataagtgtgcagtggacatcgtctccaccgacaccatgtgggtactggggagcttcatcatgacccagtgggaaggaacgtccttttgataatagccgtcctgataagtgtgcagtggacatcgtctccaccgacaccatgtgggtactggggagcctcatcatgacccagtgggaaggaacgtccttttgataatagccgtcctgataagtgtgcagtggacatcgtctccaccgacaccatgtgggtactggggagcctcatcatgacccagtgggaaggaacgtccttttgataatagccgtcctgataagtgtgcggtggacatcgtctccactgacaccatgtgggtactggggagcctcatcatgacccagtgggaaggaatgtccttttgataatagccgtcctgataagtgtgcagtggtattgatttgcatttccctaatgactagtgatgtcgagcatcttttcatgtgcatattggccatttgtagatctttagagaaatgtctattcaaatcctttgcttatttttatattaagacagaaaatgttagacaataactattctcctccagccaaacaccacaagaaacactgcggcttcacccactcttcccccagcaaaggccaagtggggaacctcaacgtccatcctcatcaggctgtaacaaggcaccccaactcttttgccggggtggcatcaagacaggtggggaaccaggaatttccaacacacgctacaacatgggtgaaccttgaaaacattatgctaagtaaaataagccagacacaaaagaacaaatattacatggttccacttacgtgaggtacccagactaggcaaattcacagagacaaagagtagaattgtagtttccagggattggagggaagggatcatggggatttattatttattaaatacagagtttcagtttgggaggatgaaaaagctcaggagatgggtggtgataattgcacaacaatgtaaatgtgcttaatgccactgaatgctacacttaaaaatggctaacgcagtaaattttatgttatgtatattttaccacagttttacaaagtctgggtcttgctagacttcccctttcctgggcttttggctaacgagaggaggctctaattggggcttttttttttttttggtctgtaccttttgatgtttctgggttccccaggaatccagagaactctgctatgttattcctcaggtcctggggttcccttctggtctactgcttctctcctcttttagagtctttttatgtttcttttacatataacgtacagggattttggttgcacttagtagggaaagatgtgtctactccatctttctggaagcagaagtctccaggccactttatgtgaagagttttgtccacatttcatttctttttgctcactagtgaagtcttattcatttcaatttagtatataaaacttatagctgaaaaatatatttcattttcatggaaaaggactcctacttctgaaaccttgcattgatatttctagacatttccagggcaccagtcataacatcaagtaagaagcctattgccatcctccgtgacatccccttcctcaatatctcttttgcccaatgttgcaataatactaatcccaggtgtgttgactagtgccactcataatcacattagtttatcctacttatgctgatccttgtcttcttgtcctgttagtgtcttcagctcgtggctctgttccttttacactcttgttagcacatgtgatcatacacacttacattggacttgtccttttgtcctcatgataactgctgactgttaaaacacttcttggatgaagcaccctgatgtagcaccctggtaaaagcaatgggctttgaattgggatgtttgggttccgacctagttttgccactaatcagctgatcgtctccttcccctagatgtttagcctcagacccctcaccactaaagtgacaggtgtagaactagatcatccctagggacccatcctctgggaagtatcttcaggttcaggctagtcagctctgataaagtcaagagcaccgtcagaccaggaggttgagaatggaggtatcaccgtaggtgtgccctccttgatgagtttttgctgatggatatattaaccagcagtggacggtcactacaggtagaatcttcaacgagactcctattttaggtttctcaccataatttcttaatttttgttggcaattgtgcttgaagcaaaaaccaaattagaaatgatgtttgtctgttgttccccttgaagttaggtgccttgattgcgggtcctctttctgtctgccacttcctcgcagtcccccccaaaccccttatagtcctccctgaagctgcagtgttcaccctagcaaggcaagtacctgtgctcccttggtgcctcccatggcacttgtgccaaatgcaagaaagaggagccaacgcagggcccgctgcccagcaggggaggtggaggcaacgcaggtgtgatgtacacagtccctctcaggtcagggaggagagggaagtagggctaggaggaaaatggggcaggagaggaagggagagcacaagggagaactagtggaagggagaggtggatgagcaggacagctcggagagacaggaacgcaaacagaggagaattttcgctcggggtgggaatgaatcatcctcacctgccagccgcgggcctcagcaagctggcagcttcgtcctctcagactgtgggttgcttttagctgtcagccttggatggtgggctcatgcattctgttcccactccaatctgccagagggacagggtccttccccgcagcactgaggcttggccagtcgtgatgcctatggcgaccgcagaatcgacctcaacgagctcgtcgccgggcaccgttttagcagccccaccacccatttttggaaacacaaccctggcctcccattcacagcagaaaagggcacaaggcccttcgtgtcccaccacctcccttctctctggaatcactgtggctctggttgtggaagtttgtcatgagtggaccccagcaaggaattggtgcatgatatagttttcgttttcaaaggaccatgatttccatggattactttgtgcaaaggatgccaaaaccaaatatttaaagtaaatgaggaaaaaatatgcttggagtaaaaagcatctggaccctgtgcatgtgcgtgtgcatgcgtgtgtgtgttccaggagctgactctagctgtgaggatggctcgcctgtgtgtgtgtgtgtgtgcatgcgtgtgtgtgttccaggagctgactctagctgtgaggatggctcgcctgtgtgtgtgtgtgtgcgtgcacgcatgtgtgtgtgtgcatgcgtgtgtgtattccaggagctgactctagttgtcaggatggctcccctgtgtgtgtatatgtgtgtgtgtgcgtgtgcatgtgcgtgtgtgtgtttcaggagctgaccctggctgtgaggatggccttcctatccttcccttctcctggctgccctatccttcccttctcctggctgcctcccattgtgacatggatttttctctcatctttctctccctactccccttgcagcatgagaggcccagtacctgtaagactaccaggctccatcactctccagagaggccagttctgcctcttaggaagggcctagatcagcgcaaatctcaccatcatgatgtccccaactgctccgcccgtgtatgtgttgggtatttccaactgtccccagcaaagcctgcctcctccccacctcctgagccctgtggggtatcaggagcctcaccactcgagcggggaagaaggacagagcagcagcctcagcccacagcagccctgcggtggagagctgcaatgaaggcaggccttatatagacaggaaaagcagggtgactggaagtactcagtcacgggcagagtcagagccctaggacctttagggacaaggcaggtgaaagacctgttagaattagggagtgaggggctggaggtggggggtacactggaatgttacggttctatttttcgctgagtgaaaaccactaacaacaactacagaagccctgctccttctgtgggctaaaatggcactgctggctgtgtgttcagagcagctaagaaccaggaggaacagagcccttgcctctgttcctagtccccgggccctggccttgccggagtcaccggaggcaaccaagagcccctcgttcagaaagcagccatgaggtagcctggccaccctttcaccttttacaccagggagcccagaggtttccagggcttgctgaagggaatccaataagaagaagatttcagatcctcaggtgtgtgcaggggattagcccagcgctgctgtctgtccaccctgaggctcctcccccatcctcaggattgctgggctggaggcagaaagctgcaccatccttctgaagctctgccccaaaggaattgcagatgtctgcttcctttcatttggggagagaagtcggaggcacaggggccatgaaaggggaaggcgtttgacttagatagcctctccctcctggctgtccctctgagctgtcctgtggagccaggaagaggctttctgggccccagagctgtcttcttgctcgagctaggccctggctccccacgcccaagaccccggctccccacgcccaagccccccccatgcccacctgccactccactgcccttagctcgttacccctgtggctgtggaggtccctcaggaaaagcagctccccaggcaggggtcccttccttccctcaccacagccccagccccactgcaggacgcccaggataccacaaaggccccccacaatccctgctggcaaggccgtccttccacagcacacaccggagaggccttctctatgtgcctcgataacctcagacctggcttcttagagaaacgggtcaggcagtgacgtttgtggctttgtactccattaagtgctcttcaggccctccctggatcttttgagatcatggggataaggggcggtgcccagcagacctggctgcttaaaccatggtctccaggagataagagatgcataagctccaggagcccagcagtgagacaggcgcccccgcggccagaggctcacactgtatgctttgctttagggctcgggagaaagcacattgagctgcgagtgagtaagtttgccctatctctgtcattaattcaatttaattcagtcacctccgcttcatagtaagtgctcagtaaatcatctcacttttttttgaaccagagaataaatatattgatcaatatgtaaataaatagatatttaagagatgcctatacaatggatttgctgagttttcaaactattgaaatcaggaggaaggggctatgctggaggaataaacgtgtctgaatgtaggtttgtctcatgttgagtacgtagcagagaacctattctacgggatagaattgtggaataaatgacatgagggcacactgagaaaagactctgaaaagcatgcaactctgtccaagcctaacaattcaaaatgtaagtaaaatttatgatataagtgaattggctgctagaaagatactctcataaaataagctggttcttgggccgacccaatgcttttttgttttcttgagaaggagtctcgctctgtcgcccaggctggagtgcagtggcgtgatctcggctcactgcaacctccgcctcctgggttcaagtgattctcctgcctaaacttcccacgtacctgggactacaggtgtgtaccaccacgcccagctaatttttgtatttttactaaagacgtgtttcaccatgttgaccaggctggtcttgaactcctgacctcaggtgatccacccgcctcagcctcccaaaatggtgggattacaggcgtgagccaccacacccagcctacccaatgctttttgaatgactgcatgaacaaatgaaagcaatttgataaagcgtgaatgactctaccatctatcctatccccataggccccctcccccaacactcttcccctcctcagtttgaattgccatgtgaatttattgctcctgccaaatgaagtcagctgagatggaaatgttaatttattggaccagacatgtgtcaacagagctctgataaaatgcagcgacatgctgttccaaagcccgctatcccgaaacctcctaccatcctgctgcaaaactgctgtgtttgaggtttcacagcccctctggctgggtctggccgccgtcctaccatctcactcaagtcccgccgtccctccataacctcatgtgagacacacgggtccccaaagccaacctgacctttcccacctgcatctttgctcaccatggtccttccacggagaaggccctccactgccatttaggccattggaactcttctgtcctttaaggcccagctcaaatgcctcccgttcctgagctagaggtgagcttcccttcctcttccccaggcacttctttgttagggaacaggagttttcctctcctgctagactataagctccttaaaagctgagaccatctgatgagtttttaaataaccccccacccaaggctgcccccaaaactcaaatcagtgccttgcatagcagggatgcaacattaggcagtgcagagagagtgggattcagagtaagactggcccaagtcctatcccgtctccgttatttgctggccgtgggacccgggataagtggcgtaatctctgagttttagttgccttatctgtaagatggggatgacactagtcacccgtgttccaagtgtcacttgatttactgtctgcacatggcactcactcaggacatagctgcctgtctctgtattctcctcactccactagagcccatcattttcaatatttcttttaaaaggactagcacttaagcaacacaaacttcccattccttttgtggctcagaatttgggaatgggaattttactgagatcatcaaaggtgaagtcgtacataagccatgaggcagacaccagcttcccgtggatggccggattttgattgcctgtgcttagtgggaacagaagggaagggaaggacctgggaggcctggataggaactaagttcagctggtgtctttatgcctgcgtcaggcttcccacctaccagtgtcaaaggaagggcagcgtcctttgagatgtcaacagctattctgagatttttaaaaaatgaaagggttctgtgttccgggtgtcagctgactgcagcctctacctctgattgagtgtcacagggcatacgagctcattaaaggctctgagaagtcctgtagcaaagaaacctttggactttgcttaacccagtgtttcccaagttttttgtaccccttactgaatgtgggcagccctgagctggagatgtcacttctagccagagggcagtcaggtgtctgccggggagaccctggcttcagttggacaggggtgctgggatcacgggctttctttctcccaagaactggcccaaaggccagttcttttcccaggggacccaaaacagggcttaccgcctcctggagtcaggtatgagtcatgcccaccgggctctcttccccaaggcacccgacacggtctgtgtgtgccatgggctcctgttccataggcacgcacaccctcttctgctgggcagatacctctgtggcatgcgagtgtgggacctgaacccaggttctgtcagggtggcgagggggctcacgcagaggatccacttttctgtcttgctcttgtatgttttctcttcctatttgcctttttattctcctttgtatttttaaatgttcctctctagtaatttttgctagtcttttttatctctcaccttgtttcttccactgtgagtaggctcaaccattcgcctgttgtcctatgagccacatccacgcttttctacctacgtttccaaacttgagcctggccggtacactgacttccaagcctcccgtggaggccgcgcagcgcccctgtagtgccccatggcagcaagctggtgacctgagctgtgatcatgaaaaggaaatattcagcttttcttccaagtggaaatactttatgtattttctccaaggccacagaaaatgaaaataaaaaacagtactggcagcaggaataacaccaccgtcccaagaagaagaaatgaaaacagtgacacactctgtggctgccgctctcctctgagttggtcaagcagaggccctggggaggcagaggtcggacagtggtgaccgtcagtggcagttacagccctgtgtgttcggggccttcctgcttgatgtgaccagagctgagcttggcggctctcattgagcagctaatgcaggagtccccgccatggtggcctcgtcccccagcccctctctgtctttgcttctctctttgcctacctttctctcctccaagtgtggtcaacctgccctttccctggccagctcttatcaggcaccccttccccgcatttcccggccacccttctcttatgcgctgggtgactctcagtgctgactgcaggcttctcttcctgctccttcctctccccttccctttctgtcctctcagaggagcccaggtttcaggctttgctgaggtgagggtgtgggggcgggacctcttcacgtgtatcctcaagctggtcccttcttgtcctgcgggtcccagctccagtgcctccttctcagagaggcctctctcagccctggttgttttcctttgacagctcatcgctattttagaaaggtcttatttgttcactcatttaccgtccttcccacctgcgtgcacctccgtgacagcacccttcctttatggctcgctttctctttcttctcttgttccccactctatttcgtgggcctggaaagtatcaggcacattggagatgctctatcggaaaggaaaaggaatgaaagaatggaaggagtggtggaagaaaaggaaggagggaaggaaggagggaggaaaagagaggggaagggaggaagaaaaaagagaaggaaggaaggagtgggggacgattgtaatatttataagttttaacccaatagggtagctgctaccgtctccattttatagaggggaaactaaggcacagtgcttaaggaatttgtcccaggtcaaaccactagtaagtggcagcacctggctccagaaccagtctgtctccagactctgggctcaaccaccacgctctgagcctgcagtaagatgtacaaggcagaagtcctgtgggtgacaattgggactccacccaccatgccagggaacgtctccatcagaagtgggagaagaggagttaatttttacttgacactgactgtggaagtcattatctcagacacaatttcacttcgttttcatcacaaccctctgaaaaggaccctttacaaacgaggactctaagaatcagagaggctaagggactggccagagttcacacaactagcaagaagcagaggccggattcgaacccagctcttctagctccacatccggagtgttcacattcctcatgctacttggcttttcatcacagacagtcctttagatgttagtgactgcctctccctgttgtggaaagtcttgttccgtacacacctctcttaaacatgcttgcagtggatcaagtgtgctgttgcagtcacttctatacaatgtggagcagccagtcctctggcaaggatgtcgctttggtccaatggtgaaatcagacctagctcatgtcatgctgatgtagaaggccttctcctaaaagtggccgtttccatgcgtggggagactccttgtagctagcccatactctgcgatgcgggttgtatctgtggctcccgcccggtgatgtcctgtcatgatcagcttccagcagttgtgacccacttgcagtcattcaccttcacctcatgggcctgcacggtagtggctacagacacccacaacaggttcagtggatctcaactctggctgacagtgcttgtgggtgcttttaaaaacgctaatgcctggggcccttccctggccgctgtttaccttgtctctggggatagggcccaggcagtttgttaaaaattcccaggaggtacgcgccaaggacctctttctggcctgtcggatcaaggggccctgtgcgtgtgctgcagtctgtttggtggcatgtgactggctgcaaggtggtccaggcggatgacaagggagaggtaatgatgctgttaatcagaaacattaatctgtgctaatgtatcatccctcccaggtagcagaacgttctcattcagttaaaaatctcatctccttgaaaaggcccttgagaagtgagtgatgtgaatgctgacagttttggaaaccagagagagattttgggcaggagacttttcactgtgctccaattcccccctgcaggtggctacccctcccgcctgtagcaataaagattgacacaggaatggcaaggggggcctcccagagcagacattcttctagctgcatattcagcaaatacctgtgcggggcctcccaggtacaggtgctgggctcagcagggacttcagtggagaccaaaaccaggtgcagttcctgctgttactgggcttacatcaagcagaggaagttgaccttacttaagtgattctttcccacaggatgagggagccgctccctctctgcttttgggtccctgtctaaccttctgcctcagctcgctcagctgcatagacagataggcagaaccctagcattacggcaggcatctcccaggctggcttctcctgggctgcgggtggcctttgattttggagcctctgctgccccacagtgctccccacctcccacctcttttgcctttggatggggtcttccacatttcagatggctataaatacaacaggtgcaagttcagacgctccaaggagagcaaccactgccattgggttgtgcagtaaggtgtgaatgactaacatcgaatctgtcctgagagtaggttttagtagagagagagaacctggcagagttgcgggcctgacgagggcaggggaagagcctgtaaaacaagccctgcccacagcagactgttgctcagttaggccagagccctgtggaggagatgagtgtttgagtgaggagagagaggaggaggagggcaggaagaggaggaaaaggctcttgtgttatgttccagttatgcaccacaaggactgcatcatcccgggaagggcccaggatccctcctccagcaagtaaaatgagtttcaaagagcacttgggcaatcctgatcagtgggactcacctttgcctgcagggagctgacacccctggacaactggccagtggagcctctagggaggtggggtcctacaacctgacacgagccaggtttagcctcagatgcagcccatgctgacccccagtgggagcatgctgacccccagctccactgcttgtagaggggattgggagctgaggggttctttacctcctggagtcacagagccccttatggtctgttggaagttacagacccctatggaaacatacaaacaaatgtgtacatgcagcactatatgtgattttacattataaaataagcactaggagggagcaaaaggatggggtgttcattttacagattagaaaactgaggccctccggggcataacgccttcctgcaaccctaggcctctctgcctgtattaggccattgttgcgttgctgtagagaaatacctgaggctgggtaatttataagaaaagaggtttcgttggctcacagttctgcaggttgtaaaggaaactcagcaccagcgtcagcttctgatgaggcctcaggaagcttccaatcatggcagaaggtgaagggggagcaggaaatgtcacatggcaagattgggagcaagagagagggagggaggaggtgtcacacacttttaaacaaccagatctcatgagaactccctatcccaaggacagcaccaagacatgagggatccaccgccacggcctgaacacccccaccaggcccacctccagtcctccagtgttggggatgacatttcaacatgagatttgagggacagatatctgaactatagcaccaccatgccagttccctttctttctgtcatcccagatctaccatgaatcatgtgtcacatcaaattagactcgttagggcataagcaggggccccgcagtccagaatgttccaaataaattgagacttgtccatctgtgtgtcctgatttgggggttcaaagaatagtccctctagacaggggcacaaacccttccttcacacacagtaggcccttgaggaatagtggttgcagcaataaagaagagaagagaattctcaagggtgtatgtggcctctccccctaagagattttgactctgcaatccaacctcaaccacacgggagagagggcagccagtgctgaggctggatgggggcttcatacctgtgtcatcatgggtgccggggcccagcctgccctgtgctagggtcacttccacaccatctctgtacccgccaccagtctccaatttggcccacattgcactttcagccttgctctggccctgccaagcttttcgtaatggggtcactttggccatggcctcacccctctggatgtcaggacaacgcagccagacagggtaatcagacttaggcaaaatggtgtgtgtgtgtgtgtgtgtgtgtgtgtgtgtgtgtgtgtgtgtgtagggggagggagcattcaacagggagagaataccagataataaagagctacagagccaacagggacatggagccactcccactaactgaacctccctcctctttccctccatccttggaagttgcgttccagccagctgccactgttaattcatatgagagattggaccagggagatgccaccaggctttcacccccgctgtgatgctgaggctgtgggagggatggtgtggttgactggggccaccttcattagacagagctgccatcctgataaaggaaaggcttcttgtctcagagctgtgtcctcccactggcttttctccctgcatgctgtaactggtcatctcagtcctgaagcaggtatgtgtgttgggccaaggtggaaggagagtgacactgttattaaattaacccagtccctttcattgcatcctccaagtgaagaacaaaagggattttgcatttgcccacagtgtctctctaagcaaggtctctggaacatctgtaggaactcagagacgtttggaatgggccaataaaacatggtgagcatccagcagcagcctggggtgctgggcagagccgggacctgggtaggaatcacagcaggattccagccctggctctgcgccttgcattgctctcacctggcttccatatctggaggaacatacctatttctcacgatcactgtgaagatggaatggggttttgtatttgaagctctgtgtgcagttctggagccccgaatgtccttgggggtgctctgaaaccttagtgcctttatctcttctaatggtaggaaatgcacccttattttagtcagatcctgtgaattaaattttaaaatggccataatagctaagaaggtaaactattagtgactaactaagttgaagtctccatcagtgtcaagaagacagtttcatttgctgttacataaagttttcagattgtttttctcatacttccaacccaaacgtgcagaatatttaaagcttagcaaaaaaaattatagggaacttagaaatatataaaacatgtgatgattgtaattttcttgtgttaactgggtttgcaactattttgctaggataatctgcccaattaacctctcatataacttctgaaacttgtttcatagaacacgtaagggcaaaggaaaagcaagactcagtcaatgtctgaagcaaactggagtcaatgaggcaatgcctgcttagaactttgcacgcttgaagtttcatactgttaattaaatctgcctcaattcttttttgagggacaaatgggattcaccatgggaaagagagttatctgagaggaacatcccagattggagaaggaagaggtcaactcagcccaactagagtagtccaacagtttaattctatctcactacaacataagcgttctgtcaggtgagcctgctaagttcctttcctctcttctcttgggtctgtaagagtatcgcaattctggccggacacagtggctcacacctgtaatcccagcgttttgggaggccgaggtgggtagatcatgaggttaggagatccagaccatcctgtccaatatggtgaaaccctgtctctaccaaaatacaaaaaattagctgggtgtggtggtgtgcacctgtagtcccagctacttgggagtctgtggcaggggaatcgcttgaacctgggaggcagaggttgcagtgagccaagatcatgccactgcactccagcatggtgacagagcaagactctgtctcaacaaaaaaaaaaaagcatcgcaattctctgtctcttgtcatggccatgctaggacatgggcaacctggtagtgaacaaaatacctttctctgttcctccactcagggaaatctactaatacttggttagactttaatttttcaattttgcaatctagaaacagaaaatacccataaatatcccaaaatagaaacaaaatgcggcccattcagtttccaaaaagtaaacaaagtgattcttcctccatgagatgcctgaatacattcatagttggctaattaaactaccatagaaacaattattcaatataggaggagaaagagaggaggaggaaggagcgggagcattagcagacatacatggcttttggctaggaagatagctgttacaggccagtggaatggagggaaaataacccacggagggcagaatcatttctgcagacaagtctatgaaccaagctgagccttcgtccttttttaccaatagagtttcccttctttccccttggtgcctccccagccatctgtaggaagaggatcccaacaagccttccttcaagtcagtttcagagcatttctgccctacaaggacctgggtatatcttggatgccttgggaggctcattgaagtaccataggatggccatgttttccaggtcatctgagataaccccagcataatcacctgtgtcccccacaaaattattaatagttgccctctttagctctctaaagtgcccttgtttgagtgctaactcgtgtggccagtccacataccctgcagggagggtaaagggcaccaccttatgtgtcagcgctgactggcagcagctgctggagtgctgtgttgaggagggttctgcagtcgtgttgtggctcagcaagcaaagccctggcaatgggttaactgcagcggcccgtggggcaagtgagggagaggcagcactccctgccggcacagaacaaacgctggccaggtcagggtgtgggtttcaggccagctctgctcctagcttcctgtcatctgagtgggatcgtttcccttctctgatgttggaccaagatacctgaagttttctttcaattccataattcgaatctcgtcctccatcgaggattagcttggaagggagctccgatgtcatctagcatgatttcccactccctccatctagtgggggattgtgcaagataacatccgagctcccttccaaccctagaatcgtgtgatcctatggtaactttgtgagagggccctctctgctccagagtgaagctgcactttgggacggatgtcagctagtatctagtattctcatggtgcgttttatagttgacagagcacttgcatgtatctgaccacagtcacatgactctggctttattttcatcatcttcattttataggtgaagaaattaaagctaagtaaaggccaagtaaaggggactctgggctcaaactgcctgggttcaagcacttgccgtagctctcacaatatgtgtggtttgggcaagttaatctctcagtgtctcagtaccttcatcggtaggatggggtaatatacttacatcataatgatgtttcgaggattaaatgaaacgattcatgcaagctgcttgggacactggttggaatatagaacacatgtaataaaatgagttgatagagtgagtggtagaggtggtggaggtagcaattaacagcagtggtagtagtatagtagttacacccagcaagtaaatggcataactgggactcttctcagaaactgaccccacagtctgtatgtgaccccagtgaccccagaatttactgcgctgtgtctaccttaggatttatatccacaggtcagaagcagcaggcaaggtaatgagaaaaataaagatgatgtttaaagagatgttttccccatctagccctgagagagtattggctggggagctgaaattctcccctcctcaacctccgataatctggtaaggtcagtggcaggtgcagggtgcttgttatgccattgctgtactatgggctcatggcaggtggctgaatggacaagctcgtgctccctcccgctccccctcccctcctcttgggagagactgcctgcgatgtcagtgtttcttcagtaacccgcgcacattatgtggttccatatggatcagtaaatttcccccaatctctgtattacaaggtctggtgcctcattaatggcgtcttcagcgccacaagctgaggctaacagctctgtgtttttccatcttcagtgggtctgcacacattttcagcaatttgcaggaaagacctcaattagccaaattcctacgtgactcagtgaaggcattcagaatgcactcagctgtccatcctcaggtggagaggggtgatctgagaggtccagagaagaggcagaaagaaaaagcaagcggggagaggaaaagtcaagggggagggagggaaaacggggagaaggtgagagaaaccacagcagatgtggaggagcgtgtgtgaggacatggttattttcacccagcatgagacagattcacttctttcttggatgtttggtgtcttggctaaaaatatgtcaactgaatgttgtctcagggacagggagatggagagcattaggacactttgcagaaagctcaggcctggaacggggctttctttcacatgtgggtagggggtgagtgcttgggctatgctgagagtggggcccagagcatcgacagtgcagaaactcacttctccaagagcttcagcagctccaggacccttctgcctgcctccctctcccaattccattgtgaagtggcaaagtctgttccaggtactgtgtcctgtgggagggtgaggaggaagttgaggaaacctctctcccagagactgagctggcagaggccatgggcatgggcgctgataagggccaggaagcggggagggtcctaacaccatgacaaggccaggtccttgtctgcagtgtcacagggctgtggtcctctattggccaacagtagctcctctgcacctggaggaggacgtggggcccactggactcacctgggcgactgtctgcactgtgggagggaaggagagtccagaggtctggtcagggactgaagcatggcatgaggcagccctggggctaatgcaggccctggctgtcacattccccagggagggataggcccggaatcattgctaggtagcatagaaacctaacacaccaaaagcagagaattgggtaaataaattatagtacagctattcctgctactagaatgctataaggttattggaaatgatattgtagacaaaatttgacagtgtattaaatgtttaaaagctgttgttaagcaaaaatagggaatataaaatgatacgaacagtataatcgcaattttggaaaaatacacacaaaggaagtagattaatcatataagcgaaaatgtcagcaacagtagcttcaaggaagtggaatactgctccttttccttttcctgttttttgggtgggtgtctcagagttttcttaaatttataacatagaatttgttatttggctattagaaaataaaattatcgagattataagaaataattgggacaacagcaagtcacattttgctgacttcttattggccatttgagaaaactgaaccaaaggattaaaccatgagagcagggaaccctggtccttacctttacaatataaccttttgcagccagtctttagaggtgtggctttaaatgcacttacctcatttccagcctgggcttcatgctctcctcatttgcaatgctaagctttttatctattttcccctcaaagctttgtagttcactttaaagactttactgaaggtggaaaagcatgggaagcctggattatccaatcccaatgcctgggacaaatgaaaggtcacaagaatgagaagaaaaagtttccagagggtttttagaaagccccaagagacttgggaagtcaagtaataatttggcaggaggggtcttccttgctttggtttgggtgtgcctctttggatttcgtggtattcttgttgggggaacagatgactatgttcctcatattctcgaaggcatttgtggtgggactgagaaattagcccagtcctcatggaagagaatgagagagtaggatacagctcagagctgggggcagggaacactggtgagaactaacccagcacagttattttcatatacccactgaatttccaaatcttatcaatcaatgagcagtacatacgcccaccctgtgcaaaatactgggttaaaaactggggggtctaaatatgatacatgcctttgccgtgaaggactggcaatctaattgagaaggtaataaacccatctgaagttaatattatcagaaataattgacaacagtgtgtgagagatgccacaaggtgagtagtacatgattaagtgccaagagagtggcatagacagtgagtgctgggtctgtaagaatgggtaaaatctgaggatacatgcagtagatacttcaggtctgggggaaataatacaggtaaattcttacagataggaaagcccaagctgtatttgaaaggcagtagaagggtttaggatgcccatgaaaattgtggtcagaaaggtgatatatcagttagcttgtgctgcgtaacaaactacccggatacttagtggctttaaacaaccaccatttattaacttacatttctgcaggttggtaatctggattggctcagttgagcagttcttctggacctagcagggctccactgatcttggtttggtgttcaagtgtctgctgtcagctggtggtttgctagagataggcagttcatagtggcattggctgatatggctgggatggctgggatgtcctctttccacatggcctctcattctttagcaggctttcttggcttgtttgtgtgatggaagaaaagttctcagtgtgagaggagaagctgcaaggcttcacgtggcctacgcttagctgttgcacattattccaccatattcttttggtcaaagcaagtgacaaagtcagctcagattgaagagatgaggaaatagactctgattctggaaaagaagagctgcaaaatatcgtggccatttttgccatcttccacagatgggttggttggattgggtgccagaccaaagaaccctttagtaggaaggacatagaaaggatgtaatgagctagagagtgggaaggacctgtgcttcccagtgccagtctgccgacctgtgccaatctgcaatgaaggtttatcagcctgcagttagaggagaaaaacaggaagggtgcattgtgtacatgccagggacggggatggggatggtagtggggttttcagctgttctttattctagtattgcttctccttcctttcatgaaatgaaaaggataacaaatgatcattgttatttttaatatattattggcagaataaaaagttggcaaccctgtgtccattcctaacatttcttttgcttttgtactgatcaataaaatcttgactagagcctgggtgtcactggatagcctatgaagatcaagaattcccagaaggaagaaatggctcgctaccgacccacacatcaaggaggccttcccagcagaggtgggatctcagctgggccgagaatggctagcaattgtcaggcatattttattttactttatttttatttttttattttttgagatggagtttcacgcttgtcacccaggctgcagtgtaatggtgtgatctcagctcactgcaacctccgcctcccgggttgaagtgattctcctgcctcagcctcccaagtagctggaattacacacatgtacaccatgcccacctaattttgtatttttagtagagacggagttttaccatgatggccaggctggtcttgaactccttacctcaagtgatctgcccatctcggcctcccaaagtgctgggattacaggcgtgagccaccgcgcctggccatgaggcatattttaaaaagtaaaataccattgattttggaatgtttatactgtattagtggctccttatcagatcaaacactcggcctgtcgctttagagctttcaaactgagaaacactttcaaaggaaagactgtctcttattacttgcttgtaaatggaaaacctgttttaattacacctgaaaactactttcataagattgacttatgtactgtctgttcaaaacttacagaagcaagccccaatttttttcactgacatttgaagccttccctgaagggacccccagcacatccccaccctctgtgccatccctaccctgcaaacccctgctttaaccaggtctaatgggcactgtgcttgaatgggcttgtctcctgctggccttgggtcctcccctgcctttcagctttctcttctgccctctctttggtgggaagttcctacactgccttctccaggaagccctcactcctggatccagccagctgtggtgttggctttgcatgtcactcacctggtatttagttctatttggggggctattaatcctgcctgcctagactgccaccttcctgaggcacagatcttgtcttcccagtccctgagtgccccgtgtgtgtggcatctcaaaggcggggagctttgctcactctgaaaggagccaacacagtaggagccccagactgtggggccaggcatgtatctccctgctacctacttatctgtgctgtgacactcatggtcccactgaacttgcaacccaatgagatgtcctcctggttggctggacatttccttaaagacatgagagaagaaagagagctcattaaagtcagaggtgctctctgcttgccctgggcagtgactttgcagcgggaaaccaagaggctgatgctgatgtttagcctgtgtccaagccttgtcacgctgattctgtgcaaagaggagaagctgggagcatcttaggtgatgtccttgtgttagttacttaaggttgctgtcacaaagtaccatgaacagagtggcttaagacaacaaaaatgtatacttttgtatcctggaggccagaagtctgaaatcaaggagttggcggggccattctctagggagaatctgttccatgcctttcttttcgcttttggtgttgccaacagccttggcattccttggtttgtagatgcattaatcactcagctttgcctcggtggtcacatggcttccctctttgtgtgtgtctgttttcccttcttataaggacatcaacatattggattaggggcccacaaactccaggatgacctcatcttaactaattaaattggcagtgaccctatttccaaataaggtcacatcctgaggtctggaaaagacatgtatttggggaagggaggatgctgttcaacccagtgccagcctggattctgtaacaaactgactgggaaggagtctgcgctctcctcggctaacagagagaattctgggacctaacatctattcagcaggcacacaccaagttgatgtgggggaaaagcactggggttggagtcagaaaacttaggtataagcccagtctccaccgtagtccagtggggtaaaccttgctttccttgtctttcccatggggatgataataccctttcctccctcccagggttcaggttaagaaaatccactcacacaaaagctcttcgtagcctgcaggcagtatgcacatggtggatggtaccatgcttctttttgtccaggagatggctttgtaagttaagttcagaaatttgcaaggggtgcttggagctatttgatagataccagtccctctgctcactcccaagtacttcgtgatattctatgggccaaaacaccagccgtgcccagctccacccatcttaggtgatgaggaagagtagtttccacaagctcatgagttcaggccaattgtggtgaggagtaggagaggaggctgtgcatacaaagaccagagatttgagcagcgccttagtcagttcaggctgctgtaacaaaatactgtaaactggggtatttcctggggacttataaaccacagaaatgtatttcttatggttctggaggttgggaagtccaagatcaaggtgctggcagacttggtgtctggtgagggctcattcgtggatggctgtatttttggtgtgtcctcacatggtggaaggggtgagctagctctcctgggtctctggtataacagtcctaatttcatacatgaggccttctgccctcatgacctaatcacctcccaaaggccccacctcctaataccttgggggttaggatttcaacataggaatttgggggagggaatcacaaacattcggaccataacaagcagtgatcttaactttccacagatctgctgtgctatgtttcattccatgaactggcaggacaggtgttcttatttctaactagaatccagagacactcaatgtgttgcctgaggatctgcaattagttcatggcaaagtgacccagataccttgattcatggtccagtatattcttttaactagttcccaggactgtttacagaaaactgtagacccatccaccctcacacttgccttgagtttgctctccccacctgcccacccctgactcagtctgggaggtggtgggggggtccgagcatgtatgagacccaatgctggcacagagtatgtgctccgtaaacacttcctttcccctttcccctgtaaacccaagcaccctggtctctgttcttcagatgccgcttactggtatactccttcctggcattgtaggatctggatgtggaggtctccttcccccaggtgtataggaggcccttcctttgtgttccctgcagtcctcaacatgaagctgggcccatggagcccaatccccacaggctgatggcattgagcaccctggcctcactctgtttctcctctgttcctgagcctcccacccaggaaacacacccactgctgactccatgtcccagtaccccagccacacatggcttctctgtgggcggcttcaggcaaagcttctgtctctcctcacccgctctgcacttcctgccctgcaggcagagggagctcccttcattgacgggtggccatgggcagggtgatatgtttgagaagcagtgaatcctgtagctgaaaggaaccatggggccacttaggtcagtagttcccaggccctggtgcttttcagaagtggggaccttgttagaagtcaagatccccaggtcctccccaggatcttctgacctagcaggtctggagtgggggccaggaggctgcatttttaaccagtaccccaaaatatctgtaggtagttgtaggagaaccgaagtttgggatccactcatatactccaacgtcttcattatgtggatgagaaaaatcagactcacagaggctgtgtcacctacccaaggtcacccagcttgataatgatgaaactaaaattagaacccaagattcctggcttccaagatgatgctcttactgccacagcttgctccttgcccttgctatgtttccagagggagaaaaaacataagaggcaatatggaatccagtaatccaaatgtgctctgtgctgagaggtcggtagaacatgatagttaagacgccagcctggtaccaggcagaccttggttccaaccctgtaaaatgagaataatgatgatacccacctcccagggttgttgtgagatcatctacataaaacattaaacacaggacctggcatgcagcaagaactaggggtcaagggtttggcctgtatgagagggattcaggcccagttacttcattcccctgatgttatggcaatggaggagtcccccaagcaggtggaggtacagctgccattgcattgctctgcagtaaagagtcttcaatgtagggacctcctgggcactgtgagccctggtgttccaaaccccaagattcccattccctcacctaccacaaaattcatattcatctgggagaaccaactcaaggctcagcccaaccctgccaaggtcaccagaggataaggccgtgaatcacttttcccacaacttcccttttaagggcaggtccccagcttttattgtactctgttttatatcattataattgtgctgatcagcaaggagaacagacccatttttacaagggaaaggagacacccacaaaaaaaagccaaaattatgacagtttaaagcttgcagcaaacactttttaaattagatctgccttcagtatgggtgtcagacagtttcagagcagagcctgatttggaggagaggcgagttagcccttttagggggcatgtggtcggcaaagaggccaggagcagttattgggaatgaaagtcacttacttacaagaaaggaagtggatggagggtgacgttcttcgcattgctggtgccctggtgctcaccatgatgccaggtgggctttcaatgcctggagaggggagatgaccatcctgatcatcagcctcaaagacctacctctgactgacctggggaaagggacttgattttctggggttcagcttctttttctctgggagtctgaccctctcctcccacctgccccactctcttgctaccttggggattagtggccggggctaagggagttggagcaaggccaggcctgggagacacaggtgcaagtccagataatggtgcaatcatctgttctggatgatggatcagaaaaggcataagtgcaatcttctttttaaaaaatggagtgtgtaaataagcatcattaccacattactgatagtatttggttctgtggccttgagcaggtccttccccctctttgtgctatactgtcttcatctgaacaactaaagccctggaccagatgaacttccatatcccttccagctagaatgcttgctgtgcaccacaaagcctgttagtcttctgctgccttccaggtgaaccaccaggaaggaattggagactgaagagggcaaacaaagcagacactgaggctgtgatgaggggaagtcttcctttagagactaaccctgtgccacttaggcagcgacagtccccttccacagcaacccatgccagaggagcctcgctgctggaatgaggttcctgttccacgcgtttgacgtgtgtgctgatgactctgcaccatatggtaagggtgtccaggctgctgctggtgggtattttatttccttgcctgttggttttaaggaggctgtatagatgctgccctgtgcccatctcagcacaggaagcagagctgagcagcagagatgaaaggcatacagaggccaaggaggcatccatcctggtgtagctgatgtgcttggggccacaggtggtcctactcaggggcagtccctcttgtggggccgcagacctggagcagtcttagcctgggtaagcccaggtgcaggagagaggagggaggtttggctaagacaatagaagccctgcagtgccctggacccatgcctgctttgataaatagcccttctctgcctccattcatctatccacccatccattcatccacccattcactcacgcattcattcattcatccattcacccacccatttatccatgtacttctttgctttcttctcactcatgaatgtgaggatacctcatggcatcaagtgctgttggtcatcaaaaggaccttggaggagatgtgctctaactctctgaggctcagtccctccattgcctacagacagcccttccttcttgggaaactccaagtctggaagttctttcttgagacaagatcggcctccgtctcgttcccactgcttagtcctgccgacttccttctcctttccagagccacatggaccaagcctgatcatttcaagggacagccgttgagcccagtgtttctccaagtgtggaatgggcccttcgcatggctggggagacaatttggggcagtacatggacattttaaatagttatttttactgttacccttatcatagcaagcaataatagtggtgatttttaaaaaaagttccctttccagatttttatgtaagaaaaaagtgagttgatttaatgaaaaaatgaggaaaaacgctatgcatacatggacatggcaagggctccaatggtcccgggggatgctgcactggggagtctcacctgcgctcccttcctgcacccgctccctctgttcccctcacttcacactgttctttgattgtggatatcacataactatctgtataggttgtttgtcaagcccacctgtcaggcctgaccccccgtctgtaatccccacatacatctccacggggaggccatcacatctcttcatcatgtcatatctgaagtgagcttctcagacaccctggaattctagaaccactaggggttggggaaagggacatttcttaagtatttcctatttaatgtgttcagttcacatcttccctttagtcctaaaagagtctctgcaacaagatattctctccattttacaaccaaagaaatggagacacaggaaggttaaaccatctgtccaagctgcaatagttgtggaagagctaaaattctaaacttgatttgtctccttccagcgccgtggacgtcccactacactgggatgccttctagctgcatgcacgaaggggagtggggattatccagccaaattcacttttgtggataaagaaactgcggtctggcaagtttgcatggcatgtccaagtcccctggggtcactggccagcccacactttggactctgttttctgtgagcctttcattcttccagccgttctgaatgaagtctgaaggccacgtttgatagtccccgtcaggccgtaacattttctcactctgtcttttctcttcctcttctccctctctttgattcagactgtcattacctccttcctggaccacggcagaggtctccccacttcagtctagttcatctaaagattgcttttcatatttatttcctaaaacatagcttggcacatatcaccctttgatcgtgaaccgtcgtcagcccaagtcaacgtggatgttaggtcccagatacaacatcctgggtagggagtgtagactcttcctgcgatcctggaggctggctggagtttagacctcacctgcctgggcagaggctttcccccaccgtgcagacactccagcaaacaggggctgctgcttgtttcccctgaggatcttgtgtttctcatgtggaggtcaccgaccttgaccaggaccccattgtgcagctcctcccctgccaccttcaggcctcgctgccaccacacatcctgaccaccagccccagcaatcgccttttctccaaatccttaaactgccgattaccagcagggctcatgtggcaggttgcacacacaatctgtgttgtaatttgtccatggcatgtgtccttcctgcccacttgcctggactgtgcaccccaaaggcaggggaagcatctcctgccctttgtaactgcagtcctttgtcccagtgctctcagggtgggccctcggcacaggccgtccgtgttgaggatactaaggtgtcctggtgggtgctgctcatttgaattcacatggtccgggcagggggaagggttgcccgggaagaagggtggcctctgcagcacccctggagttgcaccccgagtgctgggagacaggcagcctgagaggtgaaagcatgttgtcaaccatgacatgctgcaggcactggagggaggccgtggctgggacatcgaccttgatggcattcagtgcccttcaacttctactctggaggactctgtgagcctctagtgcccggcactatacaatgcactgtggatagcacaggaaaatctgccctcagagtgctcctgctcctgaagcaggagcgaggtcttgcacgcttgctgaatgggacagcctggaaagcaggccgtcgtgccatgtaccaacatcccaaacgagcagtggacagactggccaggaggctgcagaaccacaggaaaaggagaccgagaggctgggcaagccaaagcaccctcccaggggaggagaagtccagctggcctggctgtgagagcttcccaggcaaggggctgcaggggcagtgatggagatgggtggtcagggaggcaacttctccaccggagcagtgagagttgggagaagacaagatatggaggtggggaaggaaggatttaagcagagaagctgggtcctgatgaactactaattgggaatccttataagttcttgagttagggaagtggcatgttcaaagtgagactctggaaagttccttgtcagaaattcactgctcagaaattccttcatcccttgaaggtaggaagaagccaccactaggcggggaaatattgggtctgcatccctgtgtcctccagctgtagatctgaggctgttgaaggggcctcttctccgcctcctcaccccggcctctctaagagctgtaacgttactgcctccctcccacagcctcatcctctgctccatagctctgtgctgtaacaagaggctaagcacagaattacatgggctacccttggctgggggtttgggctgatggctgtagatctagtctgagaccataatttgaactaagcatctcccacacaggctgggagctaacagggaggcagagcagcatttgtcttccagtgtctgcacgctactgccttttccacccaggcaggactaagttgagctttaatatgcccaaatggctgataaggggtggaagcactgggcaccgttgcagagacatcagatgagcccatcaatagagctgctttcagaagcaagtactagaaaactcaactcggaatgactttcacaataaggaaattttatctcacatacaggaagccccaaattaaggtggcactgaagttggttcaactgcttcccccaggacctcagtttttcccaccttttctctttgcccaccctcagcatgttgctcttgtcatcaattagctgtcctcatggtccccagatggctgccacagttccagacttcacatatagacatggatgtttcccattcaacgagagatcatagtgcttttgtgctggtatgcctctctgtctttctgaatcaatgagaaaatttcccttcatgccacactggcagggttgggtctcaggccacttctgaagctaatggatggagaagagaaaaggaataaagtcagctttagctgggttacaccagtggtgggttcatagccagtggtgctcctcataaggtggtgaccaggtctgacaggcagtgggaagaaagtgtgtggtaggggaagagtggggaggcctgtgcagcagccagcacatgactcaaaaatcaggcattcagtgtagccccaacaaagccccaacacacttcccattctgacaattgtgccaggtaaagggggttctgaggtggctgggaggtgagctgatggagtccagctttccctctaatcacaaacaatgggaaaaaaacattaaactcaacattctggctctaccacctactagcagtaaggctttgtggaagattatctaagccctctgatctgtttgctcatctctatattggagatagtttttacccatcatgcagagttactgttaggattagaacagaaatgtccaggctccgactgttgctaatggcagctatggtggaggtgatgatggtggagataggggaggtggaaatggtggtaatggtgatgatgggggaggtggtgttggtggtggcaatgatggtaatggtagaggtagtttggatggtggtaatggggatggtggtaatggtgatagtggagatggtagaggtggtgatggtggtggtggggatggtgatgatggtggtggtggtaatggtggtggtaatgatggtggtgatgatggtggtgatggtggtggtaatggtggtggcggtggtgatgatggtgatagtagaggtagtagagatggtagtggtggtggcagtggagtggtggtggtggtgatggttgggatggtggtgataatgatggtgatgatggtggtggtggtggtaatggtagcggtatgatggtagtggtggtgagggtggtggtggtaatgatggtggtgatgatggtagtgatggtggtaatggtggtggcagtggtgatgatagtgatagtagaggtagtagtagggatggtggtaatggtgatagtggggatggtagtggtggtggtggtggggatggtgggataatgacggcgatggtgatggtggtggtggtggtggttgtgatggtggggatggtgatgataatgatggtgatggtggtggtggtaatgatagtggtaatgatggtggtggtggtggtggtggttgtggtgatggtggggatggtgatgataatgatgatggtggtggtaatgatggtggtggtggtgatggtggtcatggtagtcatggtggtggtggtgatggcggaaggaggtgatgttggaggtggacatggcaggcagatggggattgagaagtccagagcagggtggccactgagctgcatcgtggaggagtaggagttcttggaagtggagaaagtggcagggatgggaagggcatgaagaagaaagctgccggaaacagcctgcctggtttgggtgtggtgagcctttggtgtggctggagcacagaatgtggctggggaacggggagggtcagactgtgacagaccttgaaccatgctaaggaggctagatcccatttaagggcagaagggagccattgaaggctttcgagcagtaaaactccctaggtgtcaatgagcctggttaggaagctcttttaatatccaaacaacccatgatgggggcctgagtggggagaggccatggggtgaggcagaaagacaggatcctgttccctgggccaggtgttggtctaactcctgaaagaaggtgggcagttagtagagagttttaaggccactgctgcactttttccccatttgggaaattacatgctagcccacaggtcactaagcaaatgcccattgtccccaggagtaattcagccctgattggtaatatctgtcaccctctccactccattgcccccaaagaagaggtaatcaccatgagcacagtgagctccttggagagtttggggctgtggccacgctctgacacacagctgcccaatgacagaacaagtagccttatgaggacctgacagccctgggatagaggaggtcagtggagaaggggcttctgccctgggcaggtggctggcctgggtggcatttgggcttcctctcaactccaagagggtgacacaggcagcattgtggcaaaggttgatcatgccctctgtactgttcaaacgctggacaccaggcaaatcaaatgccccatgcctgccctgtaggttgcagttggaaaaacgtgggccataaggaggccactggggtgtgcaaatctaccgcattggcttctcatccccagacctgcctgtgagaggtcagcacaggcacatgtcttggctggggcagtggaagtgaagagcccaagaggcgtgcacagggctagtgtcagacaacgaggcagctttcagcaccctggatctgagcacccacacccacgtgctggggcagggaggcaagtcaggcccacacccatgtgctggggcagggaggaaagcatactcgcaagaaactgataggcaactaagccatttcaacttaacatcctgggcaactacagagaaagagataagtttgagaagggtttttttttttttaattgagctactgtaaaagcaatgaaactagcatactttttaattcacccagcctcaattgctgcttgccctcaataaataggtgcattgttctcttcaaggctgctttgctgttaggctattagtggttttccctgtccttctgctttacaagaatgtcctgagtgtaagcccagaccgttcggagcagcaggcaccttctagcagaggctgctgcagaagacccccggcaggacctgccctcaggattgtgaaatcacagcattgccccacctccctgcccagcccttcttcccagtctaggctcaccctgcgcatctgtccgctggcccactacaaaaggctgtgctgtcaaacatttaagatccaaaagaatgcttctttttttattgtggtaaaatatatataacacaatttaccattctaaccatttttaagtgtgaaattcagtggcattaatcacacccacaatgttgtgcaaccatcaccaccatttccgaagtttttcatctccacaaacaggaactctgtacctgttaagcagtaattcccattgctccttcccccagcccctcgtaacccgtaatctactgtgtgtctctgtgaatttgcctactctagatctttcatgtaagtgggatcatacggtatttgtcctactgtgtctggcttcttttgcttagcacagtgttttcacggctcgtccatgctgtagcatgtgtgggaatgtgtaggcaccacattttgtttatccatttctgtcagtggaaggaaggcttcttcatggctgaatctcaggcataggtggagatcccaggaggaggaggccttcagtgtgggaggcctgctgcccacccctccagccatacctggcaagcaggcttttacctgcccagcagctcctgttgggcacagtaacccaggggtttcagacagtccatggatagagacggccgtgcttcagcagaaggaatgtcagaccagccatggagaaactctcatgcccctcacataggcaagacatgtgtccttgaatcagccccctcacctccatatcccaaggagtttgggatgggtgtcctggtttttctcccagcctcttacattctccaactcatcgatgcgctgagagggcaatgcggcaagtggagcaaagtgctgcaactctcaggaagtatttgtggcgtgctggatgaatacatgggagaagaatgaggtagtgagagctaagaggttgtgcatccttcatctctcagacagagaataggcaggaaatgcatgtagaggtcgggctgatgagtattcaagttctgaaacaacctgagatacagcgtgctgcttgaggtgttattattgtgttgattgtcttttgcaccttgtactgagatggaattgcataactgggcttctcatcaattctgtttggtggagaattcttgctggcttccataagtacatttacataaatctaggtgggcacacacaagctgtcttggtatgagttctcacaccctgggtctgtcacctagtggatgtagccacacagtgttcagcacaggtgggtgagcatcccccagctctactgtgcacatgggagtagacacttcagtcagtctctccagactgtcctggtcccaagagatctaccctggcatggcttctgctcacaaggagtctgtgttcctctaaagcacaaatattaataatctcattaatggagggtgttttgttataaagtctctttgtattcatggtgatcctcagaacaacaaggagaggaagtgaagaagaggagctctttattccgtcccatgtcctaaaatctcactgtgcctttggcagaaatgcacacaaaccagggcctggcggtctccctcgccatagcatcttggagggactttggaagttagctaccgctttggaagtggtattcaaagttccaagaaaaacgaaaaaaacactgatccctcttttcaaatcttatgcagaacctggcacataaagccagtaaaattcttccggactggtcagtaataggtagctgctgctgctttttgtgtgtattctctgtccacactctgtcatattggctccctggaccctcttcaactgtgttaggacccttcgacactcagcatgtgggattatggcattgctctggttcaagaggggatggggagtcaaagcctccttacttagccttcctcttgcctgcacctgtcccgaagccctctgtggaggcctagagctctttgcagcactgtaattttcttacgtccttttgcacatgagaaaatagacccagagaagtagagtgacttgtccaaggatgtgcagccagttggtgccagaatcaaaattattaccatcattcaaagacttctcatcagtaaagactcatcattattattctcattcttgagtctttgtcctcaagaagcttataatgtagttgaaaagagtggtaatatatacgtgagaagataaattggaaaactaggatagcctgtacacatcagtgtctaattagctccacaagtgtttagaagccatcatgattcctggaactggggctctctctccactgacctcttctaaatatttcagacatgagtgtggccatggaccccccagttgccagtaggagatctaagaaatgaacagggagagaaggaagaaagggagaagaagatggaaataggaagcaataaaggaaaaatggaattgaagagaaagtggtagaaaggaagaagacaggagctatctgtgggcaaggtcatcagcctgcctcaaggctggcagggatccacccactgtcagaggagcagggtcctccaggagcaccggggaatcccttccagcctgtattgggccgttgttgcagtgctataaagaactgcctgagactgggtaatgtataagaaaagaggtttaattggctcatggttctgtgggctgtacaggaagcatagtgccatctgcttctggggaggcctcaggaggcttccaatcatggcagaaggcaaagggggagcaggcacatcacatgatgagaacagagcaagagagagaatggagcagggaggtgccacacatttttaaatgatcagatcttacaggaatgcagagagctcacttatctccaaggggatgggctaagcctttcatgagggatccatcctcatcacccaaacacctccaaccctagggattacaattgaacatgagatctaggtgaagttatgctcaaacgatattctgctcttgccttctcccaaatctcatgtcctcatgttgcaaaatacaatcatcccttctccatggtccccccaaagtcttaagtcattcagcattaactcaaaagtccaaagactcatctgaagtagcagggctggagggcccggtaggagcaagatggaaggcaaatcccttccacctatgggcctgtaaaatcaaaagcaagttagttacttacaagatacaatgggaatataggcattgggtaaactttcctgttccaaaagggagaaattggtcaaaagaaaggggtcacagtccccaggcaagttcaaaacccagtagggcagtcattaaagagccagaatgatctgctatgattccgtgtcccacatccagggcacactggtgtgaggggtgggctcccaaggccttgggtatggcccatttgcagctttgaaagtctgggtgtttccatgctattggtctggggttcattctctcttctgcagttgttcgtacctcctctacactatccaaccttaacactgaacagtaggaatgggagtcttcatctgttccacttggcttccaaagcttcccgtttcccaagatcaccaaaagggccagtttgcatgctgaatatttggtgccttctcaatgagctctgtgaccacccaggatttaggagggcacacaggcctctggcttcagagttcaggcatgaagagggccacggaactgtatattcaaggaaccagaggcacgtggggcatctatgagaacagtctttgaccaactttttcttttcttcactccattcatactcgcccttagatgtttctatgacagcacaacgtatgttttgaaggaattaaccaagctgtcttgcttgtttttgttttttgttgttttttttaaagtaattctagaagggcagtcatgcctctaaggtcagagtgaataacactgcttcttgcaacatttagtcagcacacgcacacacacagtgcacacaaatgctacacagtgaccgtgtcccagacgtttcaacaataggcagctgtctttctctggattcctgttcagacccgctcttactggctctctgggcccttccagttctatctcagacccttaaacaatcaggcatgaggattgtgaaaccagccatgtctctggggataagtggtaccagtgaactgcgtttctccagtaccccggcaggtgagatgtgatgaacagacctttggcttgaaggtcagaaagtctggtttcctgtcctctgtgcatttctccctggcttgagtatcttgtcagaatcctaatttttcaggtgaggaggttaattagataacctttaagtttctttctctcccagacttcatgattttaagagaggtcctgtaacttctgctggagataaattcgcataatgtgaagggactttcttggggatgaggtttctgatgggatgcacatgctaatgggggtttgtagtggctgttccgtactgatttggagcccagcctctgcccttttctctttagtctgcacactctcctcgttcagccgtctcctgcaagatgaactctgctctgggccccacctctgtaggtctgatccccaatatctccacttcagcaagttcataactgatgtctctaccttcctccaaaacccctcttcctcttcttgaagtcccctgctgcagtgagaggcatcaccatccacacagtcacccaaattagaaacctcagggagggggcattgcacatctctgcactgcctcttccctcaacccctacgtacaaccagaaaacaaagcacatgctttctcctctcaaatccacctacatctcaccaatcccactatctctactttggctcccgcctccatgatctctgcatgggtcactcccctgcccttaaccctatcactcattctccagccagtgccagattgcagggcgtatctcaccaggtcattcccattctcctcagaatggaatccaagcatccaggcatagccacaaagttcctggtcatcttgctcctgccgggccctccagccctgctacttcaacaccctcactccagccaaatcaaatgtttgcatagcagagctgtccatacttcccatcttcttagttcactctccacctgcaatgcctgaccccctccacattccctactccctacccccagcacctaaccttcttcacctggacaactcttcatccttcgagattcagcttgaagattcttactttgggaagtccatccatagccagctgtgcttgcctccggaatgccatgccatgtcctaattgtattggaatcatctgtccatttgccctgcattgtaccagtacatccttgaggtctgtttctgagactttttcctcaagtctccagcacccaacacttacataaacatgtttgtgaatgcttgagttaatgttggattgaatgatcactgtcaggtgggacaggtccctctgggtctccacatgttctatgccaggatgcaggacaaatgttacatggcatggatcgcaggataggctttttttgggaaaatttgccaaggccaaaggtcaacaagagaagtcacatcccccaacccttccatctcaaaaagagatatgccaggtccaggatgctgctggccctgcagtaaacctgtacccaagtggagggccctcaccacaccccgcgacccatggctctctctttttatagggcaattaagcaagagaaagcagcctgtcaatgaggaaataagcagactgcttggtaccaggcagtctggactaggggtgccagctgcttataggagttgtctgggaatgccagtttcccagcatatagggccctcagagccttcaggatattgctgctctctctgccagagggaggagtggttctgtgcttgagtgctacctcttctggagggctcattatctagacaacccagagggagatacagggtcactttttgacaatgcaactagttgtgccacactgatcatgaatgactaaggggacagatgggtggatggatgggtgggtaagtgggtggatggtgggtgagtggatgagtagatggatgatcagatagaagaatgagtgagtgggtgaacgaatgaatgggtagatggatagatggatggataaatgtataggtaggtaggtggatggatggatggatggatatatgtaggtgggtgggtggatggatggatggatggatggatggatggatgggtaggtgggtggatagatggatagctgaataaatggataggtgggtggatggatggatgggtgagtgggtggatgtatagatgggtggttggatggtgggtgggtatatatatgtatgtatgtgtgtgggtgggtggatggatggatggatggatgggtggatggataggtgggtgggtggatggatgagtgggtggttggatggatagaagaatgggtgagtgggtgggtgggtgggtggactgacggatgggtgcgtcagtgggtggatggatggatggatggacaggtaggtgaatgggtagatgaatggatgagtgggtggtgcataggtgggtgaatggatggatggatgaatgggtgggtggctggctggataggtggtgagtgggtgggtaggtggatagatgaatggatgggtgatgggtagaaagatagatgaatggatgggtgaatgggtggatagatggattgatgggtggatggacaggtgggtgaatggatggatgaatggatgagtagtgagtgggtgggtgggtgaatggatgaatggatgggtgagtgcatgaaaagatggatgaatagatgggtgaatgggtacatggatggatgaatggatgaattggtgggtgggtggatggatggatgggtgggcaggtgatggtgaatggaagtgtgaaagcaactagcacatatgaaagcacctgacacctaatggatacccaacttgtgtgtttccctttcctgtgctttctttcccatctcagcttcacctttctgggaatatagaaagaggtgaccctgtcatctagtggcagacatgaaagctctgaaccatcatgggttggggataaggagatgggctaaggggctgtgtgacagctccactattcccactcccacaaacatcctcaggttcccctgtgctgtgttgtctcatgttttcttcttcaacattgccctgatgtacattttaacccaacatcacctgactttaaaagattggagcttcccacgtcctgtgatttgtttgtggttcacaaccccaaggcagctgcctccctaaaccaattttatggcacaaaaatgggcaggaagggaaggacgaatctgcctctgagatgctgatgaaatctgacccctgcactcctttcccacgccgcggcgtgatctgggccttcatccacacgtgagctggtggttcttccgggtacctcagaaacacctggaaattgtctacgatgcacatttccaagcttcatagccagatgatctgtttcagtaggtctgggtagggcccagaattctacagtttttaattttgcatcctcaaactgcttcacagtgaggctggcactccctacatgcccaggggattgtgatggaatgaatgggagcccagggtactgatatggcctgatggctccctgcagagcttcccatctggccctgctcccgatggccctgccttggaggaaccttccagctggctaggcaggaggaggtgggcctttgtgggcaacatccctcctccagaatgtgggtgagcctggaacaccccctcaccactgctcccacatgcacacaccagagctccctctgactcgcagaggaggggaaaatgggtctaggggttctgagccgagtgcccacttggggctgtggacaggcccgccgcactctggagggcctatgcccgaatgcaatgtggatgggtgtttcgtggctccagtgagggatggctgaggcttctgcagaggcgagcagtggagcatgaaggcatccaggcagcctttgcctggtgggggccattaaggctctgcacttgggatgggggtgtgggagaaagcaattagtggcgagggacgtgcatgaatcagcacagagtcggctggctctaattgagccaacaagtttgtcctgttcgctctgggctcccagggatgggagctgcatccttaaatgcaaagcccttcttcaaggtggcaggggaggaagaagattgtcttctgccccttgaggaaagagaggggctctttccattctccactcccacccagtgcctgcctccatccgcaaagtgctgattttctctgctgaaatgttcgacgtctttggacagaaggttttattttctcaagaaagagatttcacatttctggatcggtgtatgtgagcaggttgcctctgtctgggctgctcttaagggatcttcaccgtctccatttctttgtggctgcatttttgctctgtcttttggaggaactcggctagtaccctccccaagaccaagtctgctgtcttcagggcttgttcctgcagaatcggagcgcggttttccaggagctgtgctttatccccttctcttttggccctgacattgtttccctttagatggagacactatgaattctcttctgggagagcacaataaaatgtcaactgattaactaaataaaatgtttcaaaaaatatgaaatttttccactagtctaatatttacatgttcatgggggaactttgatgcagaaaaaaaaaaatcctgtaatccccagtagcttggtgctgtcgcggtagagcaggtcgtggagttgctaatttggcctgggtgtccccacttggttccaccacagagggggcagcattatcttccacctacttgtgagatctactggttccaaactttccaaatccccaaaccaatgacttatttttctctcttttctatttctgtttcctaggaacgagtggaatatctctttctcataatttttacggtggaagcgtttttaaaagtaatcgcctatggactcctctttcaccccaatgcctacctccgcaacggctggaacctactagattttataattgtggttgtggggtaagtatcactgtctgtttctttccctttatcttaccagtgttgcgggacttttccttaagtcagctgaagacagggtcgttgtcagacggccacaaagatttaggctcgcagatgatctagagtgagaaaaatgagatttattttgctaaaaggaacagaaagggaaagagagactcagcaaagtgagagagtgcgcttcctgcccatgggcttcccgcctcgcaggttgaatccaaggttctacccaggaaaaggaggggtcaggcttctccctgctgcagttggtggcgtgaacttccgtggttccaccctagtgtgcactcctcccagtgcgcaggctggctggagtttctctggggacccctccccacctggctgtctcaccagtacatccctcttcttccttctgtgttatctcttttcaatttggtcctaactatgctgggcttcaggcaagaagaaaggatctgtgaaaatcactttgaattcagacttccccagagggacaggggctatgacccaagagcacccctctccaccactcccacacagcatgcacacacggttggacctgagtgctcctgatggaacccaggctgctctgtgctgctgtaggatatccccctgcttaaggactttcgtttcatctcagaccacatctggccccgcagttcctctgatagtttccctgctgtatcactgagcacatttggggcagctcgtccgtgagcatgcagtctgcaggtgtggggtgagggtggggcgcacacaggctgtgcctgtgctctggacttgtacagaggcctcttccccattctcactctacagggggcctggttctgtggccccagaaaaccagactgctcaagacaggtggatgagaaggaaacagggaactatgaaaggcgaagatgacaggtaaccaaaccccaatcaaatgcagcttcccccagacaccctgctccactgtagcataagataaggtagagtcagtctaggctttcaaaacagcaatgcaaagaatcttaaataaaatgtagaagagatctccttataaataagttattaacctcacaaaaagaatctccataaaatatttgtacctaacaggcctacctacactggtgaagtgtaagttattaaaatgcaggtgaggtcaggcgcggtggctcacacctgtaatcccagcactttgggaggccaaggcgggcggatcacgaggtcaggagatcgagaccatcctggctaacacggtgaaaccccgtctctactaaaaatacaaaaacttagccgggcgaggtggcgggcgcctgtagtcccagctactcgggaggctgaggcaggagaatggcgtgaacccgggaggcggagcttacagtgagccgagatcatgccactgcactccagcctgggcaacagagcgagactccatctcaaaaaaaaaaaaaaaaaaaaaaaaacgcaggtgatgaagttccatcaacacatctgtcttgtaataggagggagcccattgcagcagattttaccttgagaagaagccggttcctttgggctaatcccttgttactctgagcccagtgagtgctcaagtggctgccaccttggactctccctctcttgaagtcctggcagtctgcagagtcaaggtcagaatgtcaggagctctttatcccagaggcctatttttggaggatccttttgtgccatcccggaggagacacagccattgtggacgtctccagagcacccgccgttcaccatcttgtgagagtgcctggtctttactgcaggaaatgacgcaggaggacgtcgagatcatttgcaagttatttccttgtctctggccatctggatggctcataaggttgcttggaaccacgttagggtttttgttgttgttgttgttgccttattttgcctggccaatgaatgacgcactttggccacatgaacctcaggaatatttgggtgatacgaggtgcactaaggttattagcatcattagccaggtctagctctggctcatagcactcggggtgtgcatgcagctataggagagattttgctgcttctgctcatgccagaataaacaaagagtggctaaacgcatgccttgaatgactcagtaaaccatagcaaaagtccttaaggtgggttgttccaaatgcccctaaatcctttttagaatttggcatctttctcaaggcctcagtctcctgggagtcttttgcacatgcatagaaaagagccttgggaatgatgagagcagatgcttctgggaccagtggagggatgagggtgacttgcagggacgaattttgtttaggcaaaattttggaattttgaagtgagttggagttgattatatgtgctttgccccatatgtggtcttaatgaaatcatgagtcgggggagcagagacaagaaatacagggtgagtaggcaccgaacaggagccctgggagggaggggccctgcctgggttgacagggaggcagtgcagtggtgcatctctggcccacacctggtgcctcacctgcggtctgtctggacccgcttcatcccttagactcctccacacaaccacaaggggccaggctttttctggggtcagcccagattccagtcacatctccctagggcctaggccatgaggctggtgaagagagggaggcatccagttgtgtgctcctgtttctaagccacagaggttaagatgccagcagttgcccagctcgtggttggtcttgcactgggacatatttggcacctagtctctcttctcctaagggctcttcatcctgtctaaatcagcccattcttgtaacaatcccccatcgctgcagggtgcagcttaccacctctcttcagctcatctcctttttctgcttcctttgcaatattaaatgggtagccctttgcttccctgtgtctcttggaaaatatctgctatccttggcccctcttctgtagctgtaggggaaggtttctcctggcctcccacaaagctgggggagcctaactcaccctagagaaaggtggacctgcctgcctactgcctgagtgccaggctgagagcctcatctctgcattgctattctggtggcacaagacacgtggcatttctttccttcctaaagcagaggcctcttggtggtgggattgctgaataaacacagagggactgtggcggcctcagatccacgtgcccctaccgagggaccgtggaatcctcagtggatcctcaggaggttccacgccagccagtgaggctttgttgcatccctacctccctagcagggtggaggccctgcctttcccattctctgggcctcacgatcattccacagcctcacggtccttttcttctaaaagctccactgccggactacagatctgccagacacagctcccagagcagtccttcggccaggcgtccacaccagagcccaaccctcagggaccagtgggcaccaagcagtggttttgcctttagaatgtctcattgaggagaaatacaccagccactcctacacccatgtttgaattttctaccctttcagaattaaaagcggatacttaataaagagtctcaacttgaggcaggagttaaaggcaagttgtctaatctccactcccttcaccgaatagtattttgtgaacctcttttactccgatcagcatattactttcctgcaggaaatactgggaacaaaatctggtttgcatttggaatgttgtttgacaaatttgcaaactggtctccatttcctcaggtttcagtgatctaggcttcagtggaaagaacatttcccttgtggagaaagaagcccactcccccatcctggcaacttctgcctgggattcaaggcctcaccagctaacataggaagccatcaagttgccaggctgagagacactgcagatacggcctggacagggttctcaaacttcgttcggctgcagaacccactgttgagagtctcgctcagaggtccaagacacagaccagatagaagggaagctcctctggactagaggagccagaacgccagtcacgcagccagtctgtgcctgggggcctccatggagcgtttctagaccaatcccctcatcgctcagccctgcctggccctgaacttctgctaatgcatctggctaatcccccagctgcagcttcccatttctagatccagatacctggggcataagtcacttaagagctcaagcctattgctcctgaatgaaagctgtcctggttcatagtttagatctgatatggagacccactcctaatacctgggctccctccttgatcccacgcccctctgttgaagaaacacgacccagcgtgtagtgcactctgtggcaatgaatctgtagcatcctctctgggtataaaggacagaaatcaccctgcacgcccttttccctatttttcttggttgccacgaaaagcccaaaattattgagtcatccctcatcacccggactcctgttcccatggggctttgtgcatcctctgatctaatccctcctttctcaccaccccgctgcagaaaccttcccactgtgccctcccatccccatagtccctcgcctgttcagggtcagccaacttttctgtaagggccggatgctggttttcatctttgcaagccatgcagtctctgttccagctactccaccctgcccagcagcaggacaagagtggcatctccatgagtgggtgtaactgaattccaacaaaactttgcaaaacaggtggcccagttctcagcttcctttctggtcacttcctgattctccctgagggtgcagctttctctgctgtctctcagcaggcagccacttcctctcccagaagcctccttccactgcaccaggttgccaggtctaagggggccctgccagctcctgatttctgctccactgcacccccacctccctggagccctccagttttgacatttgtgtcatcagatcctctatgccttacttctctttactgcagccttctgcagacctttgagtcacccctccttgtgccttgaggacaagggctcttggttcgctctacttcactccgacactcacttctccaccttcctgcagtagcttcttggttcttggatatctggcttctggggaacctatctcagtagtcccaatcccatggctatagccaatatccctgtcaccactgattaacacctcccccataatcccaaatctaacatcctaccctctaaccagcaccaccgtctttccggtcccctccctctctcaccctgactcccacgatcccttcgtcccaccgcactcttcatccctgccaccatgtccaccctccttccagccagctcagacgccatgtgccactgctgccctcactcacttgcatttatgctcagcattcttagtcttctgtctgtttatcttgcacacctggaaaaacaccaaccctaatcaagtccaaccagagatctgcttggtacctggaaagggtcaagaaatctgcaaagttgagcagactctcactttacactcatgacctccaacctcaaggaggccctcggtgacacctgagggccctcctgctttgtccgcactccattcacccttctgctttctgagctaattctttcagcacccgtgcctctctcgtcacacttcccgtctccttcccctttcacgttttcagctgatggcctcgttccccagttcccttagaaagatgcaatcagaagaaactttcatgtattcccacaaccacgcgtctatgctgacaatgcgccttctcactgaaccacgacccacggcgctgcccctgcacaggtggacgcccttcgcatgcacccatccccttcttgccagtgaaggagctccgtcccacacggccctgcccctgcacgggtggcaccctttctgtgcacccatccccttcttgccagtgaaggagctccgtccttccagcaatggttccctctcgcttctatgtcatcacattttctgcctctgttagatgattcccatcacatagaaaactgctgtcatatctcccattcagaaacaaaaccctcttgactccacgcccacttctagtaaccccctttttttctctgctcatttagagcaaaatttcccaaaagacttgtctatacggtagccacacgtggccattcagcacttgaaatgtggctaatctgcattgcaataataataattataagtataaaacatacagcatatttcaaagatttagtacaaaacaaggaatgacaaatgtctcatgaatgattttttatatttattacatgttgagatgataatattttggctatgtcgggtgaaataaaatctatgatcactgttaatttcacctgtttttactttttaatgtggctcctagcaaaggtaaattacacatgcagcccacacttgtggcttgcatcagatttctgttggccagggctgtctatcctcacggcctcccactcctcccatgctctcttgaacctatgtctgctgggtgtttgtccacatcactccaccaacacagatgccttcaaggtctggatggtcttggtgttgctaaacccagcggtcggtgtccagccatgtctctgcagcacgtgacaccaccgcctgttcactgaccgctctcttcatggggcgccgttctctccatgtccctgctctgcaagccatccctcatcagtctgttttgttgctttctcctctcttgacccctcaatgtgggagcactgcagggttgagtgctttcacatcctcaccttctgcactggcctcctaggtagtcacatacaatttgactttaaatatgaactatacaactgctgcgcttttgtctccagcttggacctccccactgacctccagacacagtagaaccaactcaagacatgcattcgatgtccaagcaacaactcaaacttcaagaagttctcagcagaacgcttaatgtccattccgccatatctcatcattcctgttgctcatgcccaaactgttggaatcttctctgattcccctctctttctcacacctcacatctagtccatcagccagtcccactaactttatcttaaggtaaatctggtatctaacttttcctcactacctctaacaccaccacttgttctgagccacccagtgtctcgcgcctggatgactgccgcagctggtctctggcctcgcccccgacaggggagtctcccacaacagcagaatgattcttttagacctgtagttagatcatgtcactctcctgctcaaagtcccccaatggcttctgtctcagagaggataccagcacccggtggggttccctatttcctctccgacttcctctcccacagttctcccctttccctgccctgctccagccacactggtcgctgctgttcctctaacgcacaccctgcccctcccttgggcccctggcttacctgcttcctctgcctggaacagtctccagatagtgaagtgggtcccgccctcacttcccataggcctctgctcaagtgtcacctgcagggagttctttgtgcagatttctcaggtgggaaggaaggcggccctcaccctgtctctgcagagcccctccccgctcctcctcctcagcactcatcactctaagctgcagtgtctgtttactgattgctcagtttattgtctgtctccctgctagaatgcaagttccatgaggggaagggctttgtccattttgctatagccccagtgtctggaacagtgcccggcacaccgcaggtgttcttgtttgttggaggagtgaatatgccagctcagacctaaagtggcagggctgaaagccctgtgtctcagttacgtgcacgtgtggttctaccccacttgagaccttcttgtttaaccactcaaccattcattcatttgcgcagcacgcacctcctgagcagccaccaaggccagcacaaaggagatttccatgggccaggaacaagtcaaagagggggggtatctagaaggaaggaggtggggaaacagagcacatggttgctggcacacctgggaggggcgctaggataccatggagaagccggagggctcctcaaggagataaggactggcaacagacttcacctgcttcccacgtttgtccagcgcttgtccagctcctgcctttatgacggcagagggcctgcccctcagctcgctcaggcctccctgggccatggtggcaccctgggcatggccaccacccacactgaggggatgtcagcttacaaccacccacagactccacgcacacccacaacgcccgcccctgggctggagacgcctgcgcaatctgcttttccgggctgtatccagaggtcagagccccagctgggcaaaagaaaacccagtcctgacagtccttctctctttcctctcttctaggctttttagtgcaattttagaacaagcaaccaaagcagatggggcaaacgctctcggagggaaaggggccggatttgatgtgaaggcgctgagggccttccgcgtgctgcgccccctgcggctggtgtccggagtcccaagtaagtgaagcccgttcttgtgtacagtgttatctcctcaccaccttctgctgtcctttgctgaattgccaagaacactctgcaaagggacctgattccatataaatggaggggtttttgtttttgttttaaaatgagttcctttgatctgaagagcccaactcggatgtaagtgccttaaaacacactgtggtcccagcgcctggaaactcctggagaaagttcacagcagtcactcagccacatgaatcctacataaaggaagtggccatctgagccaccctggaggccctgggatggggatttaaatacattttgtagcagaagagccaggtggctaatctccgaggctccagagcactttagccaatgagattatctctactttctgtgtttttccaaagaacaatcaggaaagcatcagtggatgttctaaaagttctgttttgacctttctcccagccctctcctcccttcctgtcaaatggggcagcccaggcctcaggagccctactggaaataccacgcctgtcattgtgagaacttatttttcccaaagagaggaggatattccgctctctgaatcaggggaagggtttggagaggtattgcctatccggatgtcagtcacatggacaatgcctcttctgccacttctccagaagcctggcccattatgggtgcaccccaggtactgaacacagtggcttcaggccccctgggaaggcgcaagcaaaccccagcccaaggtgctcctgggagctcagtccactttagaactcctttctactcttccctcttcagtttgtggtatctgagaacaattctggactcatttgcttaaattttgctttcagttcagctccagtagatttggcccatgactcaagacataggagacccctcagactaggctaggaccagatgagtttggagatggtgtaagggacaggaagacagaggacctccgaatgcacagcctctcctacccatggcatgcactgagcacttggttaccggtgtgctgctgggtggtatcatctggagtcatgaaaccgtggaaatgtgagggactttatattaaccagtttactttttgttcatgcacggaatagtgaaaagatcttcctgtgactttaattaactagcaatagagccaagactagaatcatgtctcctgatttctagaccagctctttcctgccatacagcactgcctcttttaaagaattaagtggtatatctctcttgattgtcttggattctttttctttcttttttttttttttttttttgagacagagtcacactctgtccccaggctggagtacagtggcacaatctcagctcactgcaacctccgcctcccaggttcaagcgattctcctgcctcagcctcctgagtacctgggactacaggtgcttgccaccatgcccagctaatttttgtttttttgtgtgtgtttttttttttttttttttgtatttttagtagagacggtgtttcaccatgttagctaggatggtttcaatctcctgacctcatgatctgcctgccttggcctcccaaagtgctgagattaccggcatgagccactgcgcccggccaattgtcttggatttttacacatatatcctgtctcttaaactacactataagccccttgaaacccagaactgtgccttctattgcctctgattcccacacaacataagcaaagggaacttactgaataagcaaaagaaagagtttgttttctttgcagtgggactccctgggcaaagcttgtggcctgtcttaggctcaaaaggcacgcagagctgagcacacaagcacaattaaagcagactttctctactcggccttaactgtctgggggtacttaggtatagaaactgcatatatcgtggccaggacccacttctttttgaagcctaaattatttgggttttcctggtcaatcagccagaactcaatagccaaaatcaggaagtaggaagggaggatgacagtgactttgaacatgactttaaggagcttgtaatggtaccgccagtgtgtcagtgatagcaactgggagttaattccagatgccagccaaccaagcgaaatggacacaatgaccccgacctgttatctatgtatttattaggggcctgcaatttttattaggggtattaggacgtatcataaagaacaagcatggtcctttcactagagaaatttgacagtctaagaaaagagtataacagtcagcttttgctgtggaaataaaccatctcaaactctgcatggcttacaaccagcaacatttacacctggctcatggcacctgagggtggtggtcagctgcagctcttctgcactcagctggactctgggcttgaccacattctgcgtgccatccaattctggagcccaggtcgaaggagccctcaccttcggtggtaggccttgtggttgtcatggctgggggaggtgctcacaaaatggggcttagagccaaaccgcactagcaacttaaggcttatgcttagatgtggcttctgtcttagctgttcacattccactggccaaagcgagtcacatggccaccctcaaagataatggggccaagaagtgtgctgtacctgcagagaagcatgggtgaacgattgagaacacatagcagcctaccacaaagagactgaggagatgattgttatcaacagctgtagctacagtaattgctctagtacagagattcttaattagagatgaatatggttgagagccactcatgctacagtgcattaaaaggaagaattagattagatcgggtcacttggtttccactacagaggaaatttcccgaggacggagccctgtctccatctgcacttaagtaaggtagacgtgtcttgtagtggtcaggaagcagtaacactcctaggaattctctcaagaggatgcaggcctcaaatgcaaggccctcatgttacctgccgtgcagtccaggaaaatattttcgccattagagatgatgacactgagatggatttgctgttgtgggtgccttgtaggtagctccatgcttatgcataggagcagcaacggtgtctggtttcctttgggtcaccagtaaaatggtggctcttcctcagctcatccagccttctgccctttcttgctggaatagtgtctgtgcagcttttgaaacagggaaccatgcagaccatggtggatcagtgcactgtaccagtgtggttggtgtcatctacaaagatgtcagcagtatctcccctgactacaaacctagacaaatgcctccgtcttctacttctcatagccataggttatctctttctgtatttcagcaaaactcctcaagagttgcctctacctgttgtctgtgattcttgtcctcccattctctcttgaatccactctgatggggctttcttccccactgctgcaccaaaacatctcctgtccagaccatcagtgatcaccgttaccgcacccagtgctctgtcctccagggccatgttacatgatctgttggcagctttggatacagctgatcgctccttgtctttgaaccaccgttgcccttggcccttggcacactgctctttcttagctctgcccttcattcacttgtttcttcttcttggaatcctttgctgacttctgtctcatcttctcaccctcttaacattgggaagctccaggggtagatcctgagacctctcctctgtctgtactcactccctagttatcacgtccagcctcctggtgttaaatataatctatgtatcttccagtaaccagcagctgtgtgtcaccagcccagaccttttttccaaacctcagacttgtatccctacctgccgactccgttcctctcctgtctgaatagataataagtatcttgcacttagcaagactcatggcagaactcacagtcttcccagagtctttctcagcttggtaaatgctagcctcatccttctagcttctcaggccttattggacttatttctttttctcactctttgattacaatccatcagaaaatcctatgagctttaccttccaaacatgtcaagaatttgtctcttaccacctgcacactcagctcagcgctggccgccctcgcctccgtcctggatgatggcgacagcctcctgcaggagtctctgcctcaacccctatcatggcccggacctaacacggcattcaaacggccctctgaacagccaagtcggatcatgttcctgccctgctcaggaccctccacggcttccctgacttgcccagagtgagcgccaaagtcccataggccctgcgatctcacgcctccttcctccctaagctcacccccttcaccctcccctcctctccctcctcaccagccctccacagtgactcccttgctattcctccaacattccaagctcaccccactgtggggtggtggccggcacttgctccttctgtctgaacgccctcggctcagctctctgcacaggcctgcgcacctccttggcccccacctcggctcagctctccatacaggcctgcacacttcctcggcaccccctcggctcagctctcatacaggcctgcgcacctcctcggcccgccccttggctcagctctctgcacaggcctgcgtacctcctcggcccccgctgatgccatcccctcactccccgttcatccacccttccctgctccatttccccacatcacctctcaccatctgccattctgtatgtgtatgtgttcatttgcttatcaccccttacctcatgagaatgtaacctacgtgaggctaacaatttttgttagttgtgttcacagctgtgtcctcagcaccgacaataaaggtgataaatatctgtagaatgagcaaacatggttacacggacgcccatggcggctggcatagcttcacatcacaggccctaagagccaccccacccactaaaatgatgtgagtggtgccagcttcctggacatgtgcctttgctggcttttccaaagggtctttacttcttctgtctcatttgatcttcatgacaattgggtgatattaagaaatgtacataggcaatatatagatatgtagggtttttcttacaacaaataggttcattgggccatttttgacatctgcaattctagaccaatagtgttagaggccccaaaagttgcattttttttttttttttttttgagacggagtcttgctctgtcgcccaggctggagtgcagtggtgtgatctcggctcactgtaagctccgcctcctgggttcacgccattctcctgcttcagcctcccgagtagctgggactataggcacccgccaccacgcccggctaatttttgtatttttagtagagacgggtttcaccggttagccaggatggtctcgatctcctgacctcgtgatctgcccgcctcagcctcccaaagtgctgggattacaggcgtgagccaccgcacccggcctaaaagttgcattttttaaatgcacatatatgtactaaatgtcattgaaatcttatgatcacaggttatggaaatagatgattgcgagggtacaagtccatgagtcatttatcaatttgttcaacaaaatcgactgagtacttactttatgtaagattttgttagccattatagcagatacagaagtgagtcagatgctaagtgtgttctagagagcttgaagtgtagtagaagaaaaaatattcataaaaatgattatataaataaaaattggagctgtcaaaaaggaaagtttaggtaagatgtgcaatgtgatgaattctgtgacaagccatgcattggggacaccatactttggggagtggtgatagagaatcaggagagccttcttggagaaggtagcatttgggatggaacttgaaggatgagtgaggagaggcattccaggaaatcacacaaaggaaggagagtggccgtggccctggagatgcacactgtgaggctgcaaggctaacggcttgattacactgcagaggtgaaaatcagattggctcttccaatggggttctgtgtagttgaaagatttggccatttggcttcatagagactcttctacagtaacagaatcagttctctctgctgtgagcatccactctcccactgcagccgtgctgtggagcatgcgtattacaccaaagactaagccatatggaggaatcaacgttatacagccagatgaaccatagggagagttgtggttaaatatttgcaatgtatatgcaaggagtacatttgcttgtgaagcagtaagcaaggggtcgtttcctgctttccatttcatctcatatgccttctggagaagaactttcaggagggacttgataaagggagaagtcaaatggagatgagaaagatgtgtagggtctttgacgaaaactcagagcaacctagacttgatctgatgatgaaaggaactgaaaaatcacctttctgtaagaccagcactagccttggaagacactcatcatgaatgtttattgagcactctctgtgagccaagcacaaagctaggtgcggggacagaggtagatagtgcactcccatcagtcaaatcagaacacctgtccagttttcataaggaccatccggttttagatctggacctcccagtccagacttgataagagaacatctttctagagcagatagtcaaaatcatgtaacttagtccctgaaactgacatattttggagttcagagaatatctccgaatcagagcagaggctcaagcccacactgcttcactctttatcctttgctttttccactgcctgtgtcctcatcgtcccagacttccctttaatcctggttaatgtgattttgatttagtcctaatggaatgctttaaggacttttcgtgggatacgtttttcctagtatgtgagtctttacaagattagatctttcaggatgtcccttttgtcagtaaaatgttatatctggaagcacacagaatagaaaacagctcgctattaaacggaagtttactttcatcctgagaggtgagaaggagcactgaggaccatgtgtggatagaggtcagaagcttcaatttttccttgctcaggtgaggactgtttcctgaaagcaaatcagcaccagttagtagacaaatatctgtggagtggataccatatagaaggcaaggaaagccttacaacatgctggttttgaacatgagttcttgaatcagactacttactggcttctgccacttactgactctgtacccttagggaagttgctaagcctctctgtgccttagtttcctcctatgtaaaatgggaattgtaatcgaacgtattacatatgctgttggaaagactaaatgagttaaggcacgcaaagcactttaatggtgtcctgcttatagtaagtgctcagttaagtggtagctgttacattatattatattacatatgtagactgaaatagaggacaagatcattctcaagagacaacaaatatactttaaaagataaggaatattcaagagttaaatagcagtttgagaccaaaaatcaccagagaggcatgtgtatgattatttgacttgcatagtgtagatgatgaaatggattcaaggggagagtttaccagggactgtggcagtctgaaaagttttatgaaggaggacataccggagataagccctgaggtttatgtggaacaggcagggatggggatggaaggacatctgagggtgaaaaccttgtttgtttaggtcaccaatgtgggccagtctcggccagcacataggtgtggggtgcccaaacccattaccgaaaaggaagtatgggtcgtgagagccaggagacaaaagtccgcagtgagcagactgagctgggtcttggatggcacaccaagaggcagttttctaaacagccactgctgttcactctccatacaaaacgttcaaaaaaaccgcactgcagagacagctaagtgtcttggaaatctacaaaagaaggtcagaactgaccatgaatcttgaattccagggaggttcacgaacccacccgggctggtggcagagctgaggtcagagccataccgaagctgtcaccgctctctcccaccctgcatgacctccatcccagaggccaggtctgggccatcctgctctgtcctgagcgccctgccagaagatcctatgctgcttgacaccaaacactcttttttaaaacattcttactgatacgatgaatattgacttaaaaattgctgctgcagaagttgaaaactcacctgagtgccaagtccccaggtgaaccacacgcatcccgagatgtagttttcctcccaggatgggttctcccctcctggggattagtcaccgtgaaactggccacactgattagcaagcggtgccagttaatcagacccactgagggcacattagggctgctaaaagcggcttttctgagtgttttcacactttgatggtttaaagccactcatgctgtcctgtctgaaatttgctgttggtaaattgagccacagcagatttgcaatcccatcgtggctcccaggaaagtgttttctggcccagttggtgccgcattgtgcaagagaggaggctaggcagcaggcatggtccctgcaaacagctcctgaacctcgcttgcagttaaggacacctcccagtctggactgataagagaacatctttctggagcagatattcaaaatcctgtaactcagcccctgaaactgacatatcttggagtcccagagaagatcccagagtcagggaagaggctcaaaccacagtgcttcactccccatcccttgctttttccactgcctgtgtcctcatgttcccagacttcctttaattctggttgatgtgatttaacactgaagtacccacaggatgctgctggtgcagctgagcacaagcctgggtaggcagaggacccagcctccagccctgcattcacccggacaagcctggagaccttgggcaggtctgccctccctctggactttgtcctgcatctggggcttgaagggcctggactggctggcctctgcatccccttccctctcccacatgctcatccccaccgcaccaggctgtaccctcactgcttgcagaccttcagcctctccacccctgttctcaccccctctcatgtccttggacttggccctcattctcccctcactttctattttgcttcctcttgctttttatcccctttgtcttataggggtcttacaggccacatacccttaaacaacatgaggggacacttacaaagctacttatgaggacaggggcatgtgcagggggccacccctgaggccgtccctcattctccttcacacagcgctggaggctgcctggtccccctgcccgcccatcggagatggtccctacaacatcttctaagccctttccctcccacttctttcactgccacaggaagtactcaaaccttgtccgctgtatgtgtctcatggcactgttcctgaatccgaatgtctgggtgggaggggactaggctagtacaactgagcttccattctgcagagaggagccctgaggccagagggccacatggcttccttaaggtcacagagtgacctggtggcaggtgggcaggacccttgcttcctgcacggtctgcaaggggactctgatggcaatggtgagggaaccctcagggctgctgatctttgctgcccccaggtctcccagcctccccagaagggaggaagccccaggacccgctccccgccttcccacccaggcagcctggggttgtgctctgcagatggggcagagcaccctggagggcagccagagacagcagggggtggcggggggcccttcacactgcaggaggcttgcctctaagaaacagaatttagaacagggtgggtcccacgcccagccccgccctgccccttagcacctgccaggcccaccctctcccccggtgtctcctgatctcccagtgtggacggtctttccccttgactgctgcatccccagttaagcaactctcttcccggcatcctcccaggtgcccctgaaagacgcctgggccagcagctcaaggcccactcagagtcccgaccctgctgcgacttctctgttgccctgccaggtgctttgcctcggtttctcaatctacaaagagtgagtgatgggggtgccatggataaggaggagattctacctgtgcagccctgtgagctcccagcatccgagacctcttggagagggaccctgtgggttggcaggagccaccgcaccagataggaagggaagaggcccgccatgcggcaaagtgagctgatggacacagtaagcacactcacaggttcccgcctctgctatagtggagtttcactgagaggttactgagtatcaacaacagtatgtggctgaactgggaacatctctattatttagtgttctagatacagcaggtaaaaagtcctcatggcaaagaatgcctgcagtcacacaggaacgtcacatgtgtgctaaggcacacacacattcctccagtcacgaactggtctctttttgatttgagaacaaaatgtaggaggcagtgataaatgttagggttacctccaactacaagcaatattcagcatccgttcaaggccttcagactcaaagagcttgattagctgatgaatcggcccagtggtctagaaacacagggacgttatccctaatttagagataggcaaatccaggctatctagttcagactgttttccagtcgggataactccctccaggacttggtttctgttgtttggaagagaacacagcttcctgagccgaggggaatcacattgcttctgggctgtagggcgccctgcctggctctagagattgagagtagttcatagtttgcctgttgccttatttatgtttcaagagttgtgagccccttgggtggcaggacctgatggcaaatagtattgttgtcacctcaggaattgtgatggggtgggaggcactccggcctgccggtgaggagaccagggatctaagtctggccagctgtgtgaccttgtcatttaacctctgaccctcagcctcctcacctgcaaaatgggagggtacaactgtattcgccctagagtattagcctttagatgcctgccgtgctcacctttcaccatggcagttgccctctgaatcatgcgtaattttcagtcagctgacttcttgagcaccctcttgcatgttagttagtttagttttgttttgttttgttttttaatatttggcttgggaacgtttcagagccaccaaggttgttgccatttctgttgggggtaccccagtagactatgtggtgtatgaccccaaggatatacagaatcacatcgggaggggaaaaacttgttggtatatatatacatatatacaaacattagccaggagaaatggttctgtgcctctcacaaaaagctcacaaaacactgtggtctgtggcagcagcagatgatattgatgatgatagaaaagttctgtcttcactcagacatgccattgatcaagagcatttattcagagactactatctgccaggcatcgagccacgcgacacgagccaccagtccgtttcttcatctatgccgcattgtgttgatactggcaaaggactgaaataggaaatacactcatgtcataggaggtgtcaagctgtttgtcagggcagagaagaggagagtaacgtggcacaagttgtagacatcttccttctgaagacatgggtgattggaacagcatgtcatcaggtgagttttcagtgttgcttccagttctaagctgggataattctgagtattcttaaaatgtactgctgttggaggataatggaaaagcgctgaactcagaaaaagccttgggactgtgagcaccatcaactgcattgaggagacatccaaaagtataatgccttcttcaggctgtttttactagaccatatagtcctactaataaatacttgtgcaaaacagaaatacttttaaaaaaataatatatttattcacttaattttcccagaaataatgccttgatcatatgttttccccagaaattgttagacttaccttctatggtcaacaagagctttcctgaatttcttgagatttagtgaaagcaggtagatgtaaactatattaattacattgcattttccagaaataaaaaaaagcttgaatacccctgaaattcctctgagtattatcatcctgtgctttgttgatagagaatagcagtgacctaataatttcttttttaaccactaattctagacctgaggtgtcatgacagagtatgaccctgggcaaatgccactctttcagctcccaatatagtaagcaatcacacagcccagaggtgggagagtaggtcctaaaataagagcaggtatttattaagcactcatcttgagcccaggactgtggcaggtggtataatcatcacaagagacaagagggcttcttaaactcaggaagctccataatggattcctttttgtgtctggagacctccaaacatgaaatcacagacaaggtgatgactgattaaaaataatggcaataataaaggccacttaggcttataagtgacccaggctttctaaatgttggaaagaaaaatgaggggggaatgaaatgaagatccagtgaggccagcgtcctgtgaagtgatcaatacgcagaacgtgagccccatgtgcctgttattattggttgattctctcgtgctgattcatgacacttagtggttaaagactcagatggtggaatcccactacctaggttcaaattcccagagccaccatttattagctgtgtgcctcgatttcctgatctataaaatgggggctaaaattacacctgcctgcttcctggagttgttgtgaggattaaataagtaaatgcttttaaagcaatagaattgtgtgaaacacacaggaagcactcagcaaatactagctactagtactctgtgggtccaactccctatctgtctacctcaggctccaagttggactgatcagagaaggggaccttctatacttgatcttttttttttttgagaccgagtctcgatctgtctcccaggctgcattgtcaagatctcggctcactgcaaccaccccctcccgggttcaaatgattctcgtgcctcatcttccaagtagctgggattataggcatgtgccaccacgcctggctaatttttgtattttttggaaagacaggatttcaccatgttggccaggcaggtcttgaattcctgacctcaggttatctgctctcctcggccttccaaaatgctaggattacagttgtgagccactgtgcctgacgtacacatcattttaaaaataactttattgaagcgtaatttatattcaataaaattcacatattttaagtgtacacttaagtgtaataaccttaaaatcatagaatttcacttacccaaccccttgtcctgtgtgattactatatgtcttctatttacacatactttataagttccactcaacaatgtttttatttttactttagtcaattgtcttttaagtaaattatgggaaaaaataaaacatagtattttatatttacctacttatttactgtttctgatgcttctactacacattctatagatccaagttcccttctggtatcatttccccttatcttgaagcaacccaatggcatttctataatgtaggtctgctgctggagaattagctaagcttttgtttatctgaacatgtcttttgccatcctcttttgacgaatatttttgctggtatagagttcttgattgacaggtttttttttctttcagaactttaaagatgttccattttctcctggtttccactgtctctgatgagaagtcattgatttttttttttctttctgagacggagtctcgctctgtcgcccagactggagtgcagtggcacaatcttggctcactgtaacctccgcctcctgggttcaagcaattctctgcctcagctcccgagtagctgggattacaggcacctgctaccacacctggctaatttttgtatttttaatagagacggggtttcaccatcttggccaggctggccttgaactcctgacctcgtgatccacctgcctaggcctcccagagtgctgggattacaggcgtgagccaccatgcctggcctgatattattgttattatttccctgcacataatgtttcttcctttgctgactgcttttaaaattttctctctcagttttcagcagtttgactatgatgtgcatcattattatattcattatatttgttctgcttggagttttctgagcttctcagatacactcataaatgagaagttttcaagttcgggacttttggggccatcatttcttcaaatatttttttgtactccattctcactcttctcttgctgggactcctgttatacatggtgtttggccatgttatagtatctcattggtccccggggctttgttcagttttcttcagtcttttattctctgtgttccacagatcagttcatttctgttgattattctttcagttgactcatgtttcctctaatgtctccatcttcattaagcctattcataatttttcatttcagttacttttcaattatggaatttccattctgttcctttttatagttcccatttatttgtggaattctctatatttctccctttaagatcatatactcatttatttcctttaatcagtttttcttccatcctttaaatatatgtatctatatatggatacatatgtagcactctctctatatatatatatctctctacacacccacatatatatagctgttttcaaatcgttgtctgccaagtccaacatctgaacaatctcattttttgtttcctattgactgcttttttccttgactatcacattttatatttctttatatgtctagtgatttctttttaccgaatattagaatcatggataatatgttgttgtgactctggatcttttcatattcctaagagtattggttcatcagcagacagtttaccatgaacgtgtgtaggcttggttttatgcttgttggtgctgagacattgaaagcccaaacccctcaacctccacatttaattttcccctcctgatgttgtcagggcaatgattttggctttgccaggatggatctagagtgggtctcactgtagacaaagggccttactcccaggaggtgcccttgcagtgtcagagtcatctgtccagggtggtaatgagatgttaactaggtctctccacaatttcagggccgtaagtccaacctcctgacactgctttttccccagcactgattaacctgtaccatctcttttctgctgtcaaccctaaaccagctgctatctgatatgcctcattggtttcaccttgtacctgtacaacccagccctaagccacagacacacaggcaacccctacacaaacttctagggccctgtatctacctcgctgtctcttctggatgtcccaccacagccacttcagcttcccacattccaacctgatttctgccttctcaattccatggggctgcagtgttgtgcttgaactgtagctctttgtgctgtcctcgggaaactgttcttaattatagtatattagataatataatgttatatgttatattttactttatatgtcacacatttactgaggacttattgtgtataaggcacagtagtaattggaagaaggaaaggtactagaatcttgctttatttggaaaataacaacttagaaaattttagagccagattgcattttctcatccaatgtccaccttttaaagatgttgaaacctggacccaaaaggtgacatgacttgtcaaggtcacacagttattgatagcagaagaggaaatagcctggcattttcccccactaaatccctccaaaaatatattttaaaagaaaatctaagcatgatgtttagaaatttttaccactatagaaaatttggttagtgccaaagtccctattgatgcaatagtgatttgagccagaattagaaaataagtaagtatgtgaccctaagagcattttgttcgagttacatagaaagattagcttatggcgtagagttaccgtaagttggcagcaatgaacaaatttggttctttgttacactccatctcaagaacatccagggaagagaaagctgttgcctgggtataatggtatttgccagaaaaaaaatcattagagaggtataattaagactagtttagtaactcattcaactagataactctataatgagtacatctcatttaccaccaaaaccatagagatattttgaagttttccccaaaagtataccttttttacatttctaaaggaaggagtgaggatttgcagtgagtgcaaccaagccaccttttcctcctgtttggccttattatcaagtatgttgctcagcaaacagccagtcctcagaaacttcactccaagaggctctgtcaagggtttggcacaaagagaatgtcgcaaagattttccagtgctctagaatatatccttgtattcaaaacccagttgtctggttctgggagtgagtgtggcaggaaaagctacaggtggatcccgtaggtagtttctcccataagaagtacaggccaggccaggcgcagtagctcacgcctataatcccagcactttgggaggccgaggcaggcagatcacttgaggccaggagtttgagaccagcctggccaacatggcgaaaccccgtctctactaaaaatacaaaaacttagccagacatggtggcacacgccggtaatcccagttgctcgggaggctgaggcaagagaatcacttgaacctgggaggcgcaggttgcagtgagctgagatcacgccattgcgctccagcctgggcaacaacagcgaaactccatctcaaaaaaaaaaaaaaaagaaagaaagaaaaagaaaaaaagaaatgcaggccactttttctttcagaattggcagttgagatgattcagatcaactgtcctgccgaggacaattagaaatgctggacaaaatattctaaatcttctttctggagcttggaaaagatgcctgatagaaacaaatgtgaatcctctgtggagaaagataacatcatcaacattttcaaattactttgaaaaccaattgtgtgaaaataaggttttggctgggcgcggtggctcacgcttgtaatcccagcactttggtgggccgaggcaggcggatcacgaggtcaggagatcgagaccatcctggctaacacagtgaaaccccgtctctactaaaaatacaaaaaattagccgggcgcagtagtgggcgcctgtagtcccagctactcgggaggctgaggcaggagaatggcgtgaacccggtaggtggagcttgcagtgagccgagatcacgccactgcactccagcctgggcaacagagtgagactccatctcaaaaaaaaaaagaaaagaaaagaaaagaaggtttcattcatgataccaaataactatatacacaaggagacaaagtaacctgagtgaaaacggggagaaactatagaccatagaaatagacccacagggaattgagatattggaattgtcagatatagacttgaaaataactgtatttaccacattcagagatatcaaagacaggactggtaattttccaaagaaccagatatggaaaagaaccaaatgtaaattttagaaatgaagaatacaatcactgaaatgaaaaaggcagtgaatggatttaaaagaagacttggcacagctgaaaacagttattgaactagagagagggcagggaaaaatactgataatcaaacacagaaactgaaaagaattgggaatgcagagaagagtacagaatatcagggaataagtggatgctcacatttatgaaatgtttttttcctacatctgacagaatcgttatttttaagttaatgtgaattacatattaacttgttatggaagtataatatagtggttatcttggtgtaggaggggtgagtggggctgctgtatagctggtggggttttatttcttggtctgagtaatagttgcatggctgtttgttttgtgataaatcatacattgtaacatccccctttcttgcatcttttgtatgtatatttcacagttttttccaaaaaaagatgtaagaagaagcaaaagtacaggtccaggtagctatatcattggcagatgccgaaggagatctgctccttactctgcctggagcacaaaactacagtttgccaccaatagggaggcagcacagagggacggccatcgtgatgcaatcacttccaatggattagagctgtcatgagagatgcactgttgagaaggattgtgaggccccatctggaccagagggaaggagcagcatctgccatgacgcgggccaacaagtggcacatgtgtgcagtgtagttgtcattttgcctggataatggctaaggaatggaagtggtagcttcaagttggcttggcttctaactccaactctgccatttaccaagtgtgtaatctgggacaatttatctgtcttacctaagcctcatttcttttatctgtattaagacggctggggaattaaatgaaacaatgtatgtaaagcacttatgtggtacccagcaggtgccgagtcctcgggaaatggtagttaatactattattgttgttgtttgctttagatcatcttgtctgcctttcaccatatgcagttttcttctaacacagggtttcttttatatctttttctctgaatttctcttttcaatccacattggtaatataaaaaattaattcaacttgaaggctgatattttaattactcctaaagttttaatttattggggaaccagttacccaccatccctttgctaagacaagaaccctcctttagtgttcctcataccatgtgtgggatgcagaatttattaatctggaaaggctaaattaaaaataaatgaaaatctctaatgaataaggacactctaatgagaacatgcaaaaatcataaaacttgaggctgtaggaaagctatccaggcaatagttctttccccgtttataggaagcttcttttcccagtaagaaaatgcattagtcacttttgaagctcagcttgataaacttactcctttccccaagagagaactatctgccttcctagttctagacctattttcttttgaaagccattaagcctgtgagaccattaaaagtgtctgttacttcatcagccaaatgaaggcagaaaacatgatctgtgagattcatcacgtctccagcttctagccagtgcaacatgattcatggagatcagaagtaagcgtgggctagtagtcacaacctgatgatgacagtggtgattgtcaccaccacaaatgctgaaaggagcactcatttttagaagcagtcaggtatgactttggaagatgaggacccagagttggctagtgagttatagtaagaggatatttatctgatcactatccctgggagggaacttgttggctcacaaaacttagaagccctccaggtggaatacctcctcctggcttaatggaaaggtgatggtggcacatagaaagccactctgtcttatctgcgagtcatcctacagttgcgctaccacatctgctctccacccttccccactctgctctctggctggggagtcgaccagatggcctccatcaacaggctgcctcatctccagtctgtagttgggttcagtcgatggggagccgagcaagagatcagcaggtgggagtagggtgaggtcaggttcttctgtccccagatccttccctgcaggtctgggctggcattgtcacagcctctccgagtggtcctttatacagaatgctgtccttcccactttctgtaaccactctttccacttgcttcttcagcctagtggtgctaatagatcactgttgttgccacttccaggccacccttgtggttctctttaccccatcataaaaagcaccagtcatctcaaattatcttaatttgagtgtgaggagatggtgggacaacctcgtagaaatatctagtaggcttatgaagcatgtcttgaactcagaagagaggacaaagaaaataaatgtaagtacaggtgtggatgcatgtacttagtggtgactattggactcttaggaaggagtgaagtgcatgaattttctgagagagagtttagagagagccacacaaagggcagaagactaacagaataaaagggcagagagaagctccacccatggacacagctcacaggtctagtcttctgggaactgttttcatattttcctaggtgaagatagtctctccctctcctctatgcttccaccgtcctttgggcataattcttaggaatattatcactgaggataacccccatgcaggcaaaactccagtcactgcttgagagcatctgataacaccaaaaagactggatgaggttgctgcagcctcccaggatggccagcgtgccctagggcctggctgctggttggtggggcagcagctgcagtgtcacttgagacccggttagaaatgcaaactcattccccacccatgatggagaattacaatccacattttgacaagatcctaggggacctatgtgctcatttaccctaaagggtcccactgagacctgtgtcacgcttctaagaccacacttcaaataacaatggctgtcactgatatggcctttactatgggcctgatgttgttctgggcactttgcttaaattaacttgtttaatcctcacagcaactttatgggataggtaaacgatcatcctctctttaagatgaggtcaatagttggtacaaggacacatggatgagatgtggtgggattgggattcattggagtcatttggctccaagggtccctcttcttcaaccactgcactctcctccttctcccacctcccatggcaatcagcagggtgcttcataggttctccgtaggtgcttggaagatgcacaagtgaatgatggcatagctgtctgtggtagcctcaagaaagggaaccttgatcatctggggaaaactttctacagcctgggtacgcctgtctctctcattacagaagggagagactctccgatagtattttctcagatagaggatgtagctgaggatggaaaacttcattctagattcccctgtgggagaagctggtgtttgatctacattttcttagaatctgcatcgcaaatccaaggatagtgaggttcaagggcagttatggggctcggtgggcacagtaaggacagtgcccttcacttgaacacctgttttttttaagtttttaaaaattgttttaaattttctttttgttttttagagacagggtcttgttctgtcacccaggctggagtgcagtagtatgatcatagttcactgtaaacttgaactcctgggctcaagtgatctgcccacttctgcctcctgaagtgctgggattacaagcctaaagccactgtgcctggccttgaacacctgtcttaagagaaatctatttctttcagatgacatccaattctaagaggaaggacttgtagcgaagcttagaatttgcccaccatctagtgactctttttgtttggatttggctaaagtttatttggaaatacagaaggcataacttgctttggtagggccagcctctcagtcagccatcattcagctaatcagacatctggattaagcagtatggctttctcttccattctgcaaggacagccagttcaagttaaggagcagctttctaaaactccatgtcctgactcctgccccagtcttgaaagtgggctgtcgccttaatgctggcttgaagcacagcagaatccagagtcagccccactcctgggaagccctgactacatcgggattggggatatcacatgtagaaggggttttcccaggcttgaggttgactcgccatttcttttcatccaggctttccgtattggcagaatctcacatggtgccgcagccctctcttctgttggattgggtcgctgagaagttgtggttaagattgccccagtaaagccagcagagtagaggacccctggcctaatgctgtccttcccctgcccctctgtggcaccagatggggattatttcctccactttaccagcgaggacgttatcaggagggccttcctcgtgtgcttcctgaatttgttttcctgaaagtaaaagtgatatctgcttcctctgatttcacacacaagcaacaaactggttcctcaaacctctttccagggatttctttgagagacagaacaaagccaggaggagcatggggctgacagacggagagccctgggtgtcctatagctatccaggctacgtcgcagtctggaccccacagccctggcgccgggaccctctacctgcacatacctgaccaggtcctctccccattcagccttcagcttaagcaccacttcctggaaagcctttctgcagcctccatgccaaaggaggaccctcgtggtaccctattctgcttctttaaggctcttcacagagtttattatacatcagttgcatgattatttgactaatgtttggctgcctacaagctctgtgagggcaaggcctgcagggcttgtagtcaccaccgtattcccatctctagcacgcaagcatggctcatggcctgtagagcttagctcagtaaatagtctttgagtgaaatgaaggtattgggttaggtgatcccaaagtcctcttcctgtcatggcaaactctgagtccacctatgagaaacttgtacccaccaaccccctaaacccaaacttctcttttcctagttcagtgattctcagcactgtcttctgatgaattctgtcatcaagcctccttgatcgttttcatactttcctaaggcttggctggaatctttgagtttgaataattgggaatgtgaaatgttcatgcctaaacaccaacagaaaagcagagcgtcaatgtggaatccaaacaatggaatctaacgttggcaatgatctccaattctagggtcttcaacagtttctccctgtgccctcccatctcatgtgaaatgactcaaaatatgaattcaaaagagggaagtatgggttgaagattacatgaaaagaatagagtccttaagaggagccttgaatcaggcacattaccttccagccccaggaagttctcattttcctctgctcataaaggcattttcatactcttttgtgatagtatctctggggccctgagcagaacacttcatcccaaaagtagggcttggtgagatgctgttttataaagcaaaagaggatgtgatctgttgtcagccctcgtcagtcatggtggacaatatggaccaggtaatggaagcaccaactttggccaatctgggcatctccaggctaacctcaaaaccaccgtagagaaaggtgccagacattgctttctgcaatggacggcttctcttgactttttaaggagaaacagtgtgatttatagatgcaggtcctctaagcctttcctaaccggaattgtcaagttgcaccccagagggaatgcgggcagcactgtaagaggaagaaaggaaatccatgtctgccggctaaactccatcctccccttttcccgagcccagcactgaatgatgccactgcccaaggccccatctccctggaaggtcttcctggtaccttgagagtctttccacccgccaagaggcagtcacttgacatgaactccaaactagcgagactgaatttctaggttatgtgctgtttgatctttgcatggaaccgtatgttccaaattttccagtagagctctcctgtcacatactcagtcctattggtcccataagtacacatgtgtttgtcagatcttaccctgatgtagggctagaaaaacaggctcatcacatgcgtgggccaatagtgatcttgtgttcacagaacgtttgtcagcagttgcttcaccaggcttgtctagggcccattttctttcaccaacatgagcagccagccctgaagaaggcccgacactcgcttatcagcggtgagcatggcctatctgagaacacttgggtggagaaatgtcgtgtattttccaaattagaacttgagttggaggagctgtttctggggcagctgtgagccaatcccaagaagctgttaaacatccaggccctgagagccaaactctacatggcagggtagagaggaggatgtctggccgcacgccttcacaagccagcctggctctgccaccccaggcaggccgcgaggaaagcagatggaagcgagagcctttcctggaccagccttggaaacatctgggctctcctggaagcagggactccactagactcccccgccttcccagcagatgctgcaagcacgtgtcactgctttatagactcaggtcgtggaggctgagagctgctgtctaagcgtgtggggggcatttgcacagtcgtgaagccatgggctaggagccagaccacctggcactgagccctgtgccaccacttcccagctgtgcgaccctgggtagatcactccactgctctggacccactcttctcatcagaaacatatggttacaaatagtgcctacttcctaggttgttgccgggaggagatggaatgatccaatagagtgctgagggctgctgtcgcccatggcaagtcttcagaacgcgctcatcaagttggagggcctttggtgttccagggcagtccttcacccagtgacagaatccccagtcaggcacttcctcaagtcactgcttggatacctctgaggatggggaatcactacctcttaaagcaccctattccaccttcagataagcctgtttctcggacagataagtgtttatctgtgctgaacctaagtctttcccggacacttcgcagttggtcgtagttccatcctgtggtcagacagaactcatctaacccctcttcctcaaatagcagttgagatcctctgaaaatcactgacgttaccctcctgcctgtgccttttcaccattcctgacaaaacaccttcaatttcttctaatgattattgaatgatgttatttccaattctttcattcttgtggtttctgtcttctgaaggcaccccgtgctcacgcacgtgacttggctccatgtgcatggagtccctccccacgtgcctgagacacaaagataagaagatgtgatgagactcaaggagctctcagcgaggcagggaatggctttccaggcaggggagccgcgtgcgctgggattggaggcacgaagccagagaactgcggggtgtattgctcaagcctagggtaaaaactgggagtcatttgagaccaaactggggaaggaggcaggttagtttacctgcaggtgacagggagtcactgggtgactttcagctacaaagtgacatgttccagtgtgtactttaggaagagcattttaagtgtagcttgaagactgggcaacactggaacccgggagaccagttgacaaaatgacgagcaccaaggggacagagaggaggaaaacgagtcatggatggaaaagctaacagtggctcttctcctgggggcaggacaatgagtcattgcttttttcttcttccctgtgttctgcaatttctctataataagtattttctgttttctctataattagcatgtattatttatacagtaagaaaaatgtattcatgtctaaagatacttttaaaccaaaccagcaggacttggttactgagtggaagaaggagcctaggagatcagttttctggtctgggtgctcaggtgagtggcgtgacccccagcctggacggggatgtgaggaacagggcatttggcaggaattcttatggcatctctgacagctgaaatgacgcccacaagctgctttcactccacttggcctctctccagcctgttcagtggcctctgtcccctgcaggccctgaaactcacctgtcccttagacacctatctggaaagcaggtgtctgtgcagcaatactcaccagcgctccaggacagcagtagcatttatttagatgataagttttgtcactccttcagtaaatatttactgagtgcccacatatgctcagcaccaagccaggccttagcaacaaaatggaaaagaacaggcacagtccctctcacaaaactcagcctaatgtgagagacagatataaatgttttaaaatcccgttaaggaacataacatttcaaactgaggtgcactctccagaggatagaaaatagttccaagaagacataaaggaaacgtttctggtctgggagttgcgtgatgatccctggggaaacagatgcttgggctgagagtgaaggataagtgggagggaagtggggaaaagcattccaggttgagggaacagcatatgtggtggccctgtggtgggaggaacagtagcatattcaactctctaaaagaagagctgttttactggagtgggttggggagaggcagtgggtggagaggtgggtgtagccagacccgacagggccctgtagggcacaggaaggatcttgtcttcatcctaagagcagaggaaggcattcaaagttccagcaggcctgaggcagcctgctgagcagccctccagctgtggcctggaggggagcctcccgatgggtgtccctttatgtcccacacccaccgttctcttgccattggaggcggtggcactgaggcccgtcgagacaccccttcatgcctgggtagcccagatttggggttcccaccacctcgagtagcacttggaagacgtcccccaccccccacccccagcagatgccctgaaagccgctttgcagttcagttttcaactttcttcgcggctctgcatactccaacactaatgtgtatacaacttgctaattaatggaatcatttcaatctgaaaacatcttgttctaatgggaggctgcaagcactcttattaattcacaggtaaaatcattccagcttttctcttctttctttttttttttttatcttcccagcttggcttaatagctgggaagaatcattctaatcagccttgcgagaatcacatcaccagaatgaaaagcaccaacaacggccttggggtttgggaaaggggtgaccagccttagtttacccaggggcaagcgcggtggatgaatgtgagggtgagatgccccacacagaaggtaaagacacaaaaagtgacctgtgtagtgcgacttggaggggggtttcctgtcctgtgtgtcagaggtggcactcagggtgactttctgcaccactggctctgctggagggaaggaggagctgcctccacattctcacctggcatgtgagactcactgcactcacctgggcaggaatctcacacgtgactttctcggggctgggtgtcatctgggggtgacttgctgataaccaccttcctgtcatttgcaaatgatttgcagtgtccctttaaatgaatgccatccccagtgtgttatttctggtataaccgagcttagtaaggggggccttctccccatagaccgcggtgcaagccccagacctcaccgacaacacccatgtccccaggcgggcttttcctttactcttttttaccagagggatctgggtgctttttagagtttcttttcttgtggtaataagaacataacaaaattgatcatttcaatgattttcaagtgtacattcagtggcactaagtatcttcacactgttgtacaactgtcatcaccatccagctctgggactttttccaatcccaccatgggaaaaacctcgaggataaatgagtccctgcagggccgtcttgagtccacatgagctctcactgtcctgagatgctgctctaggagaaaaagatgctcagttgtctgtaagatggggtattacacaatttgacagttatggatggaaacaacatgttcttccccttggaagtacagcagctgccagtcctttgctttggatgagtctccaagacagatttggagtgaggccaacctggatttagacccctgcaccatcagtccttggcgtgtggctctgagcctcagtcttctcatctaaacaacagggctggcagttccttccttgcagagttgctggaagattgcatgagatggcgtcagcacggtaccgcggtgatgcttggttcagtgagtggctctgtccccgcaggtctccaggtggtcctgaattccatcatcaaggccatggtccccctgctgcacatcgccctgcttgtgctgtttgtcatcatcatctacgccatcatcggcttggagctcttcatggggaagatgcacaagacctgctacaaccaggagggcatagcaggtaagaggggcaggcggctgcgctcccaaggccctgccctctatcgctcccagcacctttcccgctgctggctacaccaacatgaccagcagagcccagggaaggccccattcattcagacacacactgggcatggttaagtgagaggcagagacccgtatcctttttttctcagttccaatttttgttttaatctctgttaaaccggcctaacgcaaacttcgttcagcacttttcaataagctacacaatttgagaaacatttgaataacttagaacctatcttttgtcaatctacgacttttcaagccaaccctgagtattttaagaatcagagctgacctggggtcgtcagtctctgctccttccatgcttcagtgtggttggccattgggagccctttcacggggccgcttagccctgagcaacaggttctcccagcaccactctaagatttttctaccttcatggtgctgattccagatcctctgtaattattgtttctgcttctccattcacaggcagatgccccagagcccctattccaggtgggggaggagggcaggtgggaatcacccccttgccggcagccaaacttcctcccttcaaggagaaggcttagttctaccccatgactcccagtcccttcctttttgagccttcccacttcacgttccttccataaatcaatatatttaacagcaatgctggctcattaggcgcttccctgcgtggcactggagttttggcttgcaggatatgctgcaagctgctgctaaagctactaacatcgcagcttggccttttaaagaaacatttaaacagaaattgacaaggcttttaaacagacatatacagtggcttaacacaaagaacttgttgaaaaaataacacccaccccaaaggggctagctgtgttaaatatatatgatttttttcacacagcaagatccatcatcttagtttttagcatcttggtggaaaaaggggagcatcatctgccggaaacagtgaaggatacctaattttctccatcgacactgcacctcattcccactcagtcccagcactcagttaaatgggacctctcgcttcattggggtgaggagggatagcttccaaacaacagggagtgaaattcgtagcagaaaccaaaacagaatactttctatgtatgatctagtatgaccggatggattaactgcatatttgagggcatttctagtttatttctacatagccacagtcctaaaaacaaaacaaaacaaaaaaccacacacacaaaacgtatactcctatagacacagaatcacacaaatgttttcactttttggatggaagtctgtttaacaggagactgttttttcactctagagagaatttccaaattacttgggtcataattgtataaaataaactatcctgttttcaaaaatggaatccttgttaagttggaagaagcaggtcttgcctgtagctaaaattctgagactttttagccttgcttaaagaaatgcgaaaccatatatgaataatattttcccctttaattaaaatccttccttttattcaggttgatttatagctagctcagaaccaataaatttatatgaattgtgtggccctgtgagagctcattttaagactccttaaaaactgactgtggtatgtctgaagttcatgcagttgtattgaaattatcaatgacccatttgacccaaactcctcaggaagtctcagacatgtggagtctcaaagattccccatcagttcagcagtgaatgatggtgaggccctcactaacaaaatgggggagagcgaaatggtagaattcagccatcgagccaaagatggcggccctgctgtgcaatcagaggtctgtgcaccacagagtaaggagaggggctccaaagctgcaggcaatttccatcatcctaacgagaaagcagtccaagagtgttttctgccggtggtgggctcctgcaagggcgggtgaggataagcggccctgaatactggttggaagcccaaggctttgttaccaggcctcagaggccctggatagtcagaaaatggtgagcatggtagacaaagaaagcatggcacggggagggagccgtcctgaaggccatagccgtagggcccagtgaagaggtcgccccaacgccccaagtaccgaacctgtcatggcctcctcttctcttaggacaaagataagacttggcctccccaattggaatggccaatttaggatcacattgtccacccttgatagtaaacaggaccaggaaaagtgcctgagaagttgcctcctaccaagagactcatcagattgtttatgtgatgggtttatctttgcctgcaagttcagaagagaagtaggctcccatcacagaaatggccatgagccaagggggccaggacaacagcagaagtgctccagagagaagggccctgccaggctccatgagaaggtggcctcactcattcgctggagtcagagtccctgctgggaagaggggcccaggacacagctgcagaagcctgtcctctcaaatactctgcaatcaggagcttgctgtcccttcgttcccaaacctgccgtctgatcacaagccaggacccactctgtcactcttagcacaacacgatgccgctgctatcaagcccttgtccacccacagagtgggcagtgcagacaaggagggaaaatacgcgagaacccagacatgtctgtgcagccgtggagtagaagaccaaatacttgcaggctttgaaaccaacccctgagtgttttggagagttttatataaactttggaatgggtggtttaatttttttctttctttctttctttctttttttaaaatttcagactttggattgaattaccctattttccgcaaatttagattacacaaaagtgctttgtgagcctttgttgtaatttttgatgagatttacatcaaattctttttatagtccaatattatttcacagactgtgaattttatgtatctctagatttcaaaatacgtttgattttgagccatgtttccaataaaatccataaagaaagttatggaattgtccaggtgagccatgttctacctctagactgcccttccagggagcagccccggtgaaggcggtctcagaagaggcggcgtttccctaatcccggaggcatctgcaaggcgccttctcagctcctcaacagacacatcaccatatgccgataccttttgtttccggttgtcccatctgtttgatggtgcactgagccaggtcactctgaatagcttcccaatcacagtaattacccctgagactggcacagagctggttggctaaaacctagaaatgaaatcatcttcattctatttactccttaaagttgagttttaaaaaagtaattgatttttgtcttcagtgatttctccttggaatcactaactggagctctcccaggattgcatgtttgtgttggtattaactgcgtttctaactctctcctaatcgtcacctccattattttaccgaaaacttaatttggactttccagaatgactctacctctcttcatttctgtcttaaaatgtagaacctgcattgctttgtttctgtctcccacttcatgttcccactttcctccccaggacttcatgactctgcaaaagaaaactaacacatttttacatttaagcaaatttctcctcaccctagagtgtgtgttgctaggacctgctgatttgtgtgtgttcacattttttcaagtgttcgctttagcgctttttatagatacctatttttaccagatcatcactgcttcttaattgttctcaaatctttttcattattgttcaaatcggattttaaatagcagagtggcactaaacctttagataatgtttctgaatctcatccctttctctcttattagtgagatcacttccccttgatgccattttctttttcgcagatattcgtaaaatccccagagatgttttcctttctcgaggacactcagaattccctttggcagccttctcctcttccctgtttgtgatgtttcaggaactgagagtgcagggaatgctgtcagatgagtggtcccaatgtaaagattaacttcatctttattctgcgaaaaagcaaaacatgagaaaaagatgcaagaaaaagatgcaagcttccccttcactttttcaccctttctctttgtcccgtctctgctgtcattccagtacttttatcacagtgactgaacacatctccctagaaagctatgactagaatgggtgacaacccaacataattaatgatctaattggctcttggttttccagtctctcagctcccaaatttttcggtgcttattatccactttttcatgtattatttaggcttaggatttacattttagcctcccccttttttgtagcatcacatccaaatctctaaagatttcacatttttaaaagtcataaaaagttgtagttagaggactgcttgtttcagctgcgttaatggagccctcctgggagctggaccctgaaataaggaaatggtgtggatactgtctctctagcagttcagggaccagcagtgcagacctttgcaccttgatcaacgaacacaggactcacacacaactttaagcactggcccaagaataagccaggaagcagcattattcataatagcccaaacctggaaataatccagacgtccatcagctggtgaatggataaacatacaatgaaatacactgctcagcaataaagaggaacagagcctactgatatatgcagcagcacggatgaaactcaaaacattatgctaagtgaaagaagatggacataaaaagcctcatagtgtgtgattccatttatatgaaatttctagaggaggcaaagcaatggagacacaaagcagatcaggttgccagggactggggatgggaggaaggattgactgcaagcaggcgaggggggtttcagggagtgatggccgtgctttaaaatggattgtggttatggctgcatgactatataaacttactaaaaataattaagatgtacatttacattgataaattctgaggcatgtaaattataagtcaataaagctgatggggtcagtgggagagaaagagaggagaggagaagaaggaggaggaggaaaaggaggaggaggaggaaatgacagaggaggaagaggaaatgaaattgacagagaacaaggaggaggaggaggccacaaagatgaccacgaaggtgatgatgacaatgaagaggaggaggcatgtaaattataagtcaataaagctgatggggtcagtgggagagaaagagaggagaggagaagaaggaggaggaggaggaggaagaggaggaggaggaggagctgccactgctgctgggaagacacaatcgggcatatattttcaagtagactctattctcctaagaattatctcttacttaaggattaatatttctcttctggtcttcctcttgggagtgaacagtttcagatttaaagccaccgactgagaatcagcccaccggccagtcctgttcaatgcacagcctaacgtaggcaaagtaatcacacttacgattgttttgatatatatgaaaccagaaaataatcctgggttatctgttgtctctaaatgaagaactataagcaaattctctctctctctctctctctctctctctctctctttggaagtgtattttcattgttataggcaatcatttatttgttggaactggggtctcttctgtctgttattgtcattactttgtctaaggacaggacaatgtccttgatttcacaaacttttgtgaattccacaccgttaccttccatagccagagccaagactttctcagtgttttcccataatggaaattcttagatcagtcaggtcttgtttaaatttaccatcaatctccacactcaaaatataagtcacatcttcattcattaatttgctgggagctattcccagcacgtgaaattagtccaactgctgcatttagccacagacactgtgttctactgtttcctgacaaagccccgtccgtactgaggaagcacactccctattattcactgccgctctatcttgatagaggtcagaaaatgattcttctcttctgaaaagtattcatgctgcagagcaaagggcagagctgtgaagtcccacatgacatgcatgaaatacagtcagtagcgtgtactcacaggctgtaaggaaaacggctgcaggtgatccctctccccggcagtcagagtccgttttccgtctttcgcctatgtaaggcttcactgtaaagtgacttgcgtccctggcaatgtatcctctaatacatagtggacccatatagttagaaagctttattggatgggatcggttggctaactatgtgaaggagtctttgcattggtattgtccttaccctaaattctggtattccaatacaagtgtctatagaactctaccaccagaaaaagaaaatatggacttctaatcgctttctgggtcagtttccacttgcagtggtggcatcatcattattttttgattggccatttgattttgaggctgacatgttgcagcagaatgggcaatagaaatcaattactaagattaaaatacagcttttacaacagtgagtggaaaggactgaccttctaaattaacagcagcctaaatggaaagcctactttcttgtgttgcttaattcacatctggggacctgatttaaacatgtcttgcgctgttgttgccatggttgctttgcccatcccatcaacctcatcctgtcacttttctctctgacttctttctctgcccacatctctccctccctgctgctcccgtctcctgtcttcttctggccatttgagatgttccagcagaagatgacccttccccttgtgcgctggaaacgggccacgggcggcagtgccagaacggcacggtgtgcaagcccggctgggatggtcccaagcacggcatcaccaactttgacaactttgccttcgccatgctcacggtgttccagtgcatcaccatggagggctggacggacgtgctgtactgggtacgtagcatgagtgggcagtcagagggtgggggaacagcggccgtgaacccttccctgacacctccctttctcctcctccccatggtcttggggtcacatacgcatcttgatggaatggttgatgaagagcgtctttgatttcttccaggtcttgcctgagaaacaaggcatgagcttttcaccctaacgagtcccctcccccacccgccagccttaggggaaggtcatttttccagtgcgtcccacagtgcaaaaccctggtgtgcaggcatggatgagctggccaggctggcacaagggttccgttcaactcctcctcccatgcagagttccttctgccctcatccttttcttgcctctttcctcaaaagggagctagaaggcagaattatgtattcttagggcagaagagaagaagtcctgatcttctaaaaagaagttatataaagaaaccatttttattgaattgtgtagcattgtgacatgctattcaatttttactttttattttactcttaccttaacatattagaatagtccatcagacaaatgcattggcagcatttttactattccccaaacatgctgctggtcatgtgatgcctatttagaaatacactttttttttttaatttttattttactttaggttctgggatacatgtgtagaacgtgcaggtttgctgcataggtatacatgagacatggtggtttgttgcacccatccacccgtcatctattaagccccacatacattaggtagagaaataccacttctcgagagccacccaatcaatagcaaatcttcgtttaccttaaagttgccccttttattacccagtagccaacactactttgctgcgctttgagcctctgaagtgccagatttttgtacagcctaccccacaggcaaatccacactccatatttgagctgtctcgattctggcaaagtccattattaggaaaaactccagaaaatttattcttcatagtgtctccaacttcagcctgagaaatgacttgccagaatccagtgttgttctccagaatttgggcgaataaagcatgctgccagtcttaaaaataccatctccttcagagttttgcaaataggcaaatttatttggccatcgtgaaaacaatctaagagcctgctcagggaacatgtctacaaaccaaagcagggaagagtgagaggggagcaaatgcttcccgttgagcagagctgccagatcaaaaggaaatcatgccaagagaggcgttgacttcttcctgaatcggaaggaagagttttgtaactgtacggagatttggtgcacagtattctgtcatatgatttctttaaaagcaccatgtcctgttgattcagaatccctctttctcagtttttacatgatagtcaatatgccaaaccccagtgttgctatgacatgtgtccctccctctgtaagtgacaacttgaaacttgcccgaggaccttgtacccagcaaacatttcctgagtgtccttgcctgccaggggtgctcctaggctctgaggattcagtcataaataagatccagtccagtccaattatctcagtctaggaagccaactaaactctaaactgagtaatggcagtatggctggacccatgccgcggcaaagctgctgtgttgtgatactttcaaaaagaagacaaaggtcagaacccctctgcctcaaactaaaatgaaacactggaaaacatttctgagattcatgctcaataagaccttggttttgaataatttgtaagacagaaggaattgaacttattacacttagggaaacttattttgtttagcaaagcagacaaaattcccaagtggacctagctggtccttcttcctggggtgggtccctctgaccagccaaggacagaaacatccttctgccaacaggcagtttctgcctacaggccacataggataaatgattgtgtgggactgtgctttggggcctcatcccataagcttcaggcccatgcattccatggcatcaaactgagggcaggtggcagtggagggtgggtggagggtaggaatagatatgactgcctttgctgatgtatttttgtgttcttccttcaccactcccttcttctcccaccaccacaagtcattgatgccccaccagccagatgtgatccaaagaaatactgtcataatgacagccggggcggggagcagaagcagcaacaactgcaaccaccaattttcagcagctgtgttgtgccttctcccctggggagcgtgtgatagtgctcaggctgggaatggaaacagtgtcagaggtgaagaaacaatcccaggctcatgggacatgcctctctctgattttcccagcaccttcccaaaatggccatgttgtgtgtgtgtgcatttgtatgtgtgtgcacgcctgcaagtgtgtatacacacacgtgcacatacacacacctaaaactgaaacttgggtattcatgatagaagccctgcctagcccagtgctcctgctttcaatttctctaattgctttgacctttctacggctgtttcttccttcttcctccctctccctcttcctttctctccagtgtccctcctccttagcttctaggccagtatctctaaagcacagactctcaaatctcaaaatgttctagcatcaaacatagagctttgtaaatataaaaatacccaaacctccctcagagccattgaattagaagctctaaagtcggggccccagtatctgcattttgaaaaagctctccaggtgattctgatttccaggctggagtttgaaaacgctggaaatctaacctgttgaacctcatggtgctggtatgatgctgctggctttgaacccttctaaggagatagtttccacagggaggagggggaaataaggcctttcactcagaagaatgaattgtccttcaggcacaagggcaagtctaaaggacttgagaaggagcagccaagattttcaaatatagtaatgcatggaaaccccagagctccattcattctaaatcaccaaacagctggaaaagagtaagtcactaaagcatcaaagaagcgattggtcagccgctggttatggcctgagatagaagggatcagggaaggcacctagcagatggcagcacttgcttccagttgtggatgatacagtatctttctcttttcctctaacatccgttattgcattccattgttagattttaaagagtggactaaaaataaaatcagacttggtcgagtaatacttgaacattgcttcagctatgaaagccattggccatgcattgcattgaggctccaacaagccgagcaatttgctgaaaacatttcttctacctaatatcctgtttgaggagtgtgcagatgacagaataaggaagggtggataccggggatttggaaatgaaacaaaactcgggtttggtgtatagtttccttaggaaattacttcttaagccaaaggctcatcctttactctcagaatgtccaagactcttaaaaacagatgggtaggtgtggggagtgtgatcagataaaaagcgctggccttcttcagaggcagtgaagcaccaaggagggaagaacctaatgtgtaacgttaccattgttttccattcttagtttcacgttttgtttttttcaaaaatctaaacatccctagccttttgcacatcattcaaggctgcttgtctcccatggtctacgcatgagccatctcaaagatgtaaagtctgctgggtcagcctcctttgcaggaccttgtcgataggattcataggcatgctctgagaattccagttggtttgaaactctgagcatgacctcttacacactgtgggcagtcacaatcaggtaacagaaatatccatcaattaaacatcttttcagtgctgactttgtgttcagcacttgagatgaggcccctgctcatgggaaacagaatgacatggccactgataggggttggggacacacgcagaacgttgcaggtgagaattgtggaaggggggcagcagctagactaggcatcacactagaggatgtgtttctagctctttaggaatctcaatgcctggataattcatcaggagcattctgttgacttctgtccaccccatgcccttctgggatccccaagaatgttgcacactgtgaaccacagtaaagagcctctggcccgcgttatcctgggttcatgccccttcccatcctattgggaccaccctcttcctgacaccacccattgcccctgcattagtttctccgtgatcagttcttcgactgatttttttttacaagttaaaaattaaacttaaaaattaggttataaaaaatacttaatgagaaatcatctaaaagaaagatttttttagagtcacaaatagtgtgttctctagaacctggaatttgttttggttcagccaacaggagactcttggaacaaaaatctaatgagttaacttttcataagtcacttgtcagctccacccttcatcttgccatcccactatgtgtctggatgtgcggagaaggtatttctattaaattcacacacacacacacacacacacacacacacacaacagctattaatctcttggtattggtgctgctgaaatatccctcgtttatgacaaagaccttttgcatccaagcaggttgaattgggtgttttaccctatttttgtctactccatcttcacaaagccacctcctttcactgcagaatatagagttgctgaaggcttcataaaagttagagctgaattctgctgatgacctaggagtcattctaagtgaggagctgagaaaccctcaagtaacccagaaacagtgtccagggccctttctcaggtatcggagtagagaccgtgttaggacctctgtggtccctgacttttcacctgcctccgtgctacccccagggtgcacctgttgcctaaaatggagaatccctgatctaaacagtaaactggctgttcagaagcatatcaaggaagagagtcagcatctctcaaagccattctttatttatttattgggtttcattttatttattttgctggtattagatgagtccttatgattctgtaatttaatttagcaaacatttattgagcatttgctgtttcctgggacgagggatgtgggagcacagagaagaataaggcctgcccaggcagttcaggtctaactaaagagttgcaggacatgcggaggaacacagctgagccatgggggtcagtgccctctgtgggagcaggacagccctgaggggcacagagcactccaggaccaagtggggctttactggaccaggagagaaggctcttctgcctggggaaagcaagctttgtctcagtttgggaggccgcagagacctgggttttaggttctctcaacattgctatggctgtcagccagttgtctcctgcacaggtcttcacacactggggcccactactctctatgacagctcccaacctcccacatgatgtcagcacatgagtccatctgattccagggagtttgaaatgcatggaggagcttattttgttggcttgccttggtgttaggagcttgttgttttcttcccccatgtaaactaagcttttacctgggctctgaggcactcccgggttttcagcactcaataagcaggtgcaggggtggggagcagccaggtggagcctgttccacaacttcctgctcacttggtgctccgtgaggtagctgcccgtgtcccagcaagcaaggtgacatagattctgaaagccgcaggttgatggagctattgccctgagctgactggtgttcactggcagcagcagatcctgtcccccagtgacagtgtaaagcaccgtggctttcacagatttacacctcctgcctttcgatggcaggtgtcagcctctctctcgacatttgctgaaacgattcagcctttttggatccacagtgcctgtgccaagaaccttacaggaaaggtacacacagcttgagaacccgtggaagtctgctgggctggggagttggcctcgaggagaggggctagggaagcttattcccctgtttatctttttggggaaagataaaaagtggacttgagggtttaaatctggggttcccttcaaggaattagatgctggttgccgaaaggtctttgatagtgttcattcaatgctccctccctttgtagtgaggctgtttcagccaaggcaggggccgtcctgccagtacttgggcctggaggccctcaaggctacagacaatgagctgactttccttaggaaagtcaggagacctgaggaacacggcttaatggctctagaagacctatcccttatttcacctctaaataagggtgtcagcaatctgggtcatttttttttttaaatctgactttattctttgtcttcttaatagctccatttcagctgctttaggacatcaatctcatgactccaggcatcgccctacttcagagccacccagctttgtgtgctctctactcagctgtccccccaaagtaggtggaccagaataaagaggagaaagtaagagggaagtgaaaggagaactttcctttcagaccagagccaggcaggccagagaatcaccttctgtggcagccgagcattgctcacccaggcagtggggttctgaggaccaccctggcctcgtccgtctccatctctcatctgtcctcctgcttcctgccctcgcctgctgttccccatctcgaacctctaaaaaaccagcccacagcccaggggggaccaaagcagcagtgtgggacggcgagggggacccatgagtttcctcttatggtcctggctgtctgtggggccatgaccttgaggtctgtagctccccctttgaagtccttcatatgctggaagcctctcaccttgtgtgtggcgcagaagaaaggattcccagactaagctcgggccttaggaaatctccaaggcgcgtgggtttgtgtggcctccaaggctgcattttctgtgaggttaaatgttcacaaaatttaaggggtgtgaggaactagtgaggaaagatttcattttgaggaagttgcctgggcgccatcgagcccaactcccactcgccatctgcccaggctccagaggcagctttgggaggggaactgtggtgagcacgtcgtggcctcctggaactggctgctcccacgtgtcctgaagaaggtggggtctgtgacccagagaggagcaaggggagtttgccaagaacagacatcctctgccactcttgatcccctgacgcacacggggcaagctcctttggggtcgaacagaacagaccagttgtttggagtaggtcagtaccatggggttctgcacgcgcttcagggtgccggcgtgccctcgaggctgtctgcaggatgctgtgtgtgtgcagtgcacattactgctggtgggagtccatagttctcaaaagcttttcctgactgccccaccctctcaaaaaagtaaagcaggccgggggcagtggctcatgcctgtaatcccagcactttgggaggccgaggtgggcggatcacgaggtcaggagatcgagaccatcctggctaacacggtgaaaccccgtctctactttaaaaaaaaaaaaaaattagccaggtgtggtggcgggtgcctgtagtccctgctactcgggaggctgaggcaggagaatggcatgaacccaggaggtggagcttgctgtgagccaagatcacgccactgcacctccagcctgggcgacagagtgagactccacctcaaaaaaaaaaaaaaaaaaaaaaaaagtaaagcaatactcatttagaggaaaagaaagggactgcttctgaccctccttagcaggacttactctgagagaggaaaagctacaaggacacccacaggctccccctgaccttggatccaggtttccctcttcctcagcaggtgcctgggactcccattccagggctgtctcaaccccattgccttccctgtatcagagagtccgatacacaacagaacccttacacaagtaggcgctcggtaaatacttgttgaacaaacgtggactctgatgtgaccactgctaagaatagtcaaagaatgacctcacggttcccatcgtcaaatgggacctgcagaccacagcccatcgtggccagcacggctgtcagtgtggcctgtggtcaggcagctcatgtggctctcatgcctttctctccctaatctcatgtcaccaatcccacccatcctgtattggctcgggtttgtttttcttctcctggtgctgaagtctggtgtggtttcctttgcactgttggttcagacagttaccttatcgctaaaggaaagctcccaggctccctgggatggggacagtgtctgacacacaaggacctttcaccccgcctctcctaacagatgctcttttgctggatattttagtagttcagccactgggagaatctttgcagccaggatggcctcacagccataggctctatttttaacaattgccgacttctgcaaacctccattgctatcataggaccacatggactctggggcttccttcctgctctttatctccgttgccttcagtggctgtgcagtgcaaggttgacacaggcctgctgagcctggcccttgcccccctcagcctcacgcagacactcttccactggtggaagccttctgggaccctgcgtgcttccttctgcagttgcagctgccagcctgcactgtagctgcctggtcatttcctgtctcccctccagcaaggatttcgtgtttacagcacagtacctagcacatatcaggttcactcattcactcaaagagcgttagctgaggacctactatgtgcgaggcatcgttgtaggcacctggggtacacccgtgaacaaagcaggccagaaccaactgtcctcggggagctcacattctagcatggaagacaaacagcaaataatacacgtaataaataggtaatgatacagttaccaagtgagaagtgctctgggaaagcaaaccagatgtgagaaaatgggcatgctcagtaaacccacgttcaattgaatttcacgatggcatggccaagtgggcacacactgggaatcttcttgccccagacacgatatttgcactatgcacaatgattatgttgggtgaattttcctaaccaaaatttagtaatatcagatacatctcaatggatctgtaaagaacatattgggatgtaacacttcataccagtcagactagctaggtgtctcggtacttctcagtcttttattcccggcatgcagagaacatgtttatccagcgtacttagacaaatgcatgtggctgctgaagctgcaaagcccaagggctgagggtattactatcccacctgcctgaactcctttgaggcccctgggtggaaatcgtggggtggttatcaaacttgagcatagcctagaatcacctgggatggttaatatgcagactgtgggccaccctgagatcttgggggcatggggcaggaatctgctttgttcataactctcccagatgtttctgatgctggtggtccttggaccacactttgaggaacactgctatgcaaccttgtggaggtacatggagagccacacacttgtgttgttacatttgaaattgggagctatggagagaacaatgtgatcagtggtgctcaagcatgcatcagaatcacctgtagggccgtcaaaacgtgggttgctgggccttccccacagtgtcagggtgaggtctaggtatgtgcatttctgaacaggtccccaggtgacgctgaagctgttcgtccgtgggccacactttgagagccattgatgtgaatcattcaggacacttgtgtgccttggaagtttgggtttctatgagctagtttcacaaggacaaagttgggtgcatttttaggaagccagaacttaaccctgtttagtcagaaggcatcagaagagatagctttgagaaactaaatcagaataaatttcctctgatggaagcacagctctgcaatttatcttcacgtccaccctccagccagtggtgagctaataaatgtttaagcatctcttcttagggtcagcgggtacagggggctgatttattgcttgcctatctctgtggtgtaaatacttccaccatggtcagtttcaagctgccagtgtggtcaacgaacacggagctgggaagagatgtgcacggtgagctcccctcagcccccaggagccagctccggcgcaccactccctctggctgccgtaggggtttgtgacctttcagggcgttctccaccattcagtagttacagtcagtttccacattaaggaccatttacccctaagctgtggttgcagtcacaggacccttctctgaatacataaaccaaaatgattgcctctcccagccggtggcccgcagtacgtgtgaagcactggggtttagcctctaacttccgggcttggcccacggtccaggtggccaaggttatcttctgaggaaggttatctttcctcacacctcctctgtggtttcagttctccaggcctgtcagcaggagctgacgcacttcatacaccaaggtcaggggcctccgggtgcaacagaaggcttaatgtccaggcaaacccaagtgagttaaaccatcccatgctgaagaaattattttttgaggtgacccattttctcagacaagtgaatagaaaacattggagaaatgtttctttttcagaaaataaaaccacagagagacagagtgattcctcttgaggcagagcgggccgaggtccccttcggtcacaggagttcctttgaacatgggcgatgccctgggtaacacgggtaacctggtgcacatgaacaaagcccacgttcagccccgtctgtcccctcccaatctgctcacacctgctgcctgcctctttgctgtaacccaattctgcttcttctttcctaactttccttcgtctttccagatgcaggacgctatgggctatgagttaccctgggtgtattttgtcagtctggtcatctttggatcctttttcgttctaaatctggttctcggtgtgttgagcgggtaagctgaccgtttctatgtcctctccacaacgcagccgagcaaggtctcaggttccactccgtacatgcccggggtcctcagggatgggaccctgacaggcccaggaaaaccacaacaaagcctctgttcaaccacagattctgacccattggccaggcaggctgtttggcctctgatttgcacctagagggtccccggatcctggcgctgcgtgggtcagtgtctcgggagccggggaccggcactggccgtgctcggttgctgagtgtgcctcactaactatcattccgttcttccaggtcaatgatgccgtaggaagggactggccctggatctattttgttacactaatcatcatagggtcattttttgtacttaacttggttctcggtgtgcttagcgggtaagcaggaccaaggaaaaaggtcttgatttttccatttatttttatttattctttctgctattcctggctgtattctttttctggctctgatgaacctgggataaggggtcaccacaggagccttgaagtggatgtccttgtcctggctgggtaaagggtcagatgtgccactggtcttggtggtggacaatggaggagagctggcttcaccacaaaaagtgggtccagctggcccctcccagcctcaagtagctgtccaggcaggcagggcacttctccttgtgccttcgtggcctctggtgaacaggcctgggtaagaaaagactggtttaaaacataaacaaagacagactcaaaatctaattctcattttacttcatagactgagcagtctatctctgagtttccttttctgaatggaaaggacccttaactgtttaaagccatatattatttaagaatagaggagatgggatgcaatttcctctaactttatatctagttggctgcaagtatcacatctacctaatttcagcccttgctcagatgaagttagaagtggtagaagtaaccgggcatggtggtgcacacctgtagacccagcaactcagaaggctgagacaggaggatcacttgagcccaggagttcaaggctgcagtgagctatgatcgtgccactgcactgcagcctgggcaacatagcgagaccccatggtagaagtagcacgtggttggaaggaagcacctgaggatggccaccttttcaccatggaaacgcataggatatttcctcaacccactttcttcttcagaagtccacaccagccatgccaaggcctaacacctaaatgctcctggtgacctgctcatgggtaacccactctgctgcctttgccacttgggggaggggggtaatctacttctactctgcttgagactggtcagctgctttgcagagtcttccctaaatgtctagagaggttaatgctgggagaaatttaagcataaagacaaagattgctctccactttcccccagtacctaaactgggaatcgctactcccagctcctacagctgccctaatgcagttcagagcagtgggcttggccttcagagctgcgtagaggaaagaatctcctcccagctcttccacctcccatggagaatggcccagtagagaccttgatgacaaaatgccttttgctaaggtgaggccacacaggagactagtgccttccatcagggataacagtgatgagcagaacaacgtaagtccctgattcattgcctggaaggtagagaggttttcagttttatgttcaaacacaagaaaatgcccatgtgtttatatgtgaatctctaaggaaaagattgaaaaaatcaacctcatcaccctgaatcaaagcagaaattgaggcatcccagctctgcccttgctgggtacataatgttgggtggtttcacctttttaaatcttagtttccccatctgaaaaagtgaagctgataattccagtgcataggtggctgtgatgatagaataagatcattttcagaatacttaacacagtggtatataataagtgcccaataatggtgctatcattacaatgattattatttacttggtgcctgttataactagaagtatagaatcatcaaatattagacatgctccagcctttcctcttaaagatgaggagcgtgagcccagagatgttaagtgatttgtacaacgtcacttccctggtaagtagcagaaccagagccagccctcaaggcaccgcctcccatgagatctatgatgaatgagcttgaactgcaacacaagccacagctcaagacttttaaaagaatgtaactccactttcttcccctggagactgggaaccaaatctgagcaagtaaccccccaccaagagcctgaagtggagaatgagggctgggccctgagggtcctccctgagcagagcgtctgcccaggaatcaaagcagtgaagtcaagtgacagaaactgctgatgttggggaagaagccactttgaaggccatatcttggctgactcagcctaaaagcgctagggtgtatttagacccctcaccccaaacctggagcttagtaatattcaaaaatgttggttgactcagaacaagaacattaaggctatctgacctctgaacttaggagtctttgagtcgatacgctggtctttcctggagaccttcgccagcctctgtttcctgacctgttctgagagctgccgtctgctccttgcagctcctgaatcactgatagaacatctgccaaggcttccttggccaaaggtctgccctaaagagcaaagatgtgtgtatgggcgagcacctcccctttctggtttaaggaggcctctcctcatgtgtcaagggctggccactctgaattggttgcccccgccccatgcagtgccaaagctggaatcagcttctgttggctgaccactcagaggcaacggtttccagtcagtgtcttgattagccaggaccgtagaatagtcacacacttactgggtgcagatgtagttgaccatgcagtcaaacacccacttattcatcagacttctgattaagctacacttccagaagcattcaaaaaggtctcactgctccatgaaattgactgtcacattaacagtcactagcattctctgtgtcaggctccgtgctcggcgtgttcgctagattcgctcagttaatgctcatggcaactcagtgagctggtgctattcctgtgtccattctacagagaaggcaagtgaagctcaccaggcaaaatgacctcaatcccagcaggtgagaaatgcaggatgcagagctgagcccaagcgatgtgaatccatcacttctatccctgacctctgtggtgtactctccccaaacccataggacgggttcatcccatgcttttaaatgacaggcgagaaatggagaggggaagagcagaagctgcagtaggaagggtgagaggagcgagcaggcaggcacagaagcaatcagcacagactgcgggaaacagccagcaggcacacagaatcccagcaggaagctgcgaaggcaaccgcccagaggcctgcagcagggctgggctgcttagcagagggaccggcagccctgcagatcttcatggcccttgaaagagagcaaagccactaactgaatagcactgcagtcttggagccttctgggactgggagaagtgggtgtgaaaccctgcattccaacaattaaggataatatgattttatagccctgcacagtaactcatcctcataaattatgtccttcagtcactaaggaaagattgaacggtgcttggtgtgttgtgcttgtgaaggtagagaagatgactccataaagcttccatttaaagtgtggaaattcagggctgcgcatggtggctcatgcctataatcccagtgttgggagactgaagcaagagaatcatgcgaagctaggagtttgagatcagcctgggcgacatagtgagaccctttctctacaaagaaaatattttttaattagctgggcttggtggcagcacctatagtcccaggtattcgggaagccgaggtgggaggatcacttgagtccaggagtttgaggctgcagtgagccatagtcatgccactgcactccagcctgggtgacagagcgagactctgtctctaaaagtaaaaaagaaaaaatttttaatggaaattcaaagacttttggccctgagagggttagacctcttctatctggatcatgcacacatccagaacacctatttctgatgaggccagataaagtcaatataaagaatagatattaaaggattttttcaaaatactttattatctgatggtcctcacattaaccctatgcaagacataggactggtgctcttatggataataatcagattatgattacttcccctcagaaagctcaatctccagtcgactagaataaagacaacggtgatgatgacattcttgaaattgcacttgaagctgtaatgaggtggaagcctctggactctggttgctttttgttttaagcgactgcaaacagagggcttgggaagtgcgcctccagttggcaagaggcccacgatttcttacataggtagtcatcccatcccttttcccactgggagatgggcatgtcttgtccccaaaaagcagaggacccgggaggtaggcattttacagccaggaagtatcgctggaccatggcccacagttaagacacagtatctgggaccagaagaaagcaataaaaggtcaggacacacgtgccttgtgggtgggagcagaagagatggcccaacatacacagtcatgttatggaatgtaacccttacatgttatggaatgtaacccttattcatgacggttacattccataaagtcaccacaaacatgaagtagtggacactgagacgttggtcctgaggaactacagagttgtttcctgtgagcctctgcccacattttgtcaaccaatcaatacataaccttgttttaagtgtgtttctatttaaagacaccttatttaatatatatgattgattcatgaacattaaactcctggccactagcaccgtaactcgcacctgcgtgaagcttatttaatgcacgtgttttctctgtgcagcacatcatagccctcctacgcatagtgacacaggacggcacttcagcattatgcttggggccattttaaacagcaaaatcaccaacaaaaagcacaaaaatgagaaaacatggcactaagtggacggtgaaaaggacacctcacagtatgagagctgaattgggaaggcagaactctacatgccccttgtttggcctcagcgggaacatgtagagtttttgtcatctgcacatgtccacagatgactgaaagtgccacgagtattgattctggagttacaaacacattttagtgagtaggcgcatttgtagatgtgggatccacaaataaggagcctgggtggtatcgatgatcaaagggcctagcacacctcaggctattggttggattccacacacaccgccctgtgcatgcttcacatcgctgagccctggcccctggctctccacaccacccctcatttttcatgttggccattgctggcgagagatgcagtcctgtctcgtgacaaatcccacagctgtgactgattgtcttgccggcttcagtccctgggcccagtgcagactgtcaggctggggctccatgtcttcattagctcagtccccagagcaggaacatggctggcatccaggcaaggagataaagagagccaggcactgccaccagcagatcctttaccgtgggaaaccttggctcatcttccatccagcctcaagcctgtctgtgcctcatactccatgggatccagccatgctccagatctgactaaagcccttctccatccctctcacactcccaaaacacatccttcctctatgaggaaaattatcttcaagccaggcagaatcaccagcatacctcgtgttctgtttctccccctgtaatgtttattttagatccccagaggccttggggtatagatggtgagcttcattccatgggactgttgctgtaaaacaggattgggccaattgtccctattccagttgagtcccagtcctattctcccaattccaaaagaaggatgggaaggtgttttgtaaccagaacttgaaccctctgcaaagtcactcaaaagagctgaagtgagcccttacaagggactgtgaagttcagccccttgcaactccaaacccaccccagaggggtgcaaatggaggtagacagaaagacagtcaagagaggaggccttgaaacatagtttttggagttgatttgcatagggagaaaaatgctatatgaggttactgtctccaggagcaagactaaggccccgaaggcttaaccaggtacaggggataagaggttaggaggagaggggatggcatctctctatgatcatccccagaagggaaggagcaaagtttccctcgccattgtgagctgtcaatctgtcccttttccctagcataaaagtccttgggaaaaaaatgaaggtacccactggttggcaggaagcccaagaaacagcaagtacaatccaattagaattggattcaatcaaatttaagaagaaaattcaatccaaaccagagcatcattaaggcagcagttgaagagaactggttagcttgacagcccccacattctcccaattaaaaagttccctaggccccaccccagccccaactccatctcaccataaagacggtgcatgctgaaattagtgctctcccaagtggcacaggccaaatgcaagcactaggcagtgcaggtagtgatggagctgccccacatgacagtagactcagaagcagagccctttgccctcttatggtttgtggtgctgtccctccttccatggtgcctttcctagagtgtggcttcagcaaaaaattctccaaggtgcttccagcagcctcgtgccctgaactgggccttcatgggtgagagaggaagacatcatggctccaagaattaaccaagatgtcctatgcatgtacacacacacacacacacacaaatacacacatacatgcaccaccaagggcctcattccccaaagactgcatatcaaaaccaaaaatactcccctatgcctattttgcaagaaaaggcacagacttgctttgagggttgagaattcactttgttgatgattgccttctcctgccagcctcctccttgctcagaaagtgaattcgaagtcagagagaaaattaggacagaatcatagaaaagaaatagttattgtgtcagaaatttttcaataggccattcttccagcaaatcccaccccagtttcaatttctactcattattactttaaatcaaatgcatcatttaacttttatatcatcttgattttatgtatttttctattctgattggatttctttaaaccaaaagggcagcccccaggacattttcttgtgtttggaatcttcatttgtcttcatgtgggagagaaccttctctagattagaaatccttccaggaatgctgagtggcaggttgagctcgtcataagaatagagattgaggacattaaatctcctgggtcccaaatcagtggtatactggtaaatatttaacaattggctctctatggggaaagccctggttttcagcatttgccagttaccatggtgtaaatattcccactgtggccgatctcaagctaccagcgagacatccctgaagccagagttgggaagagacatgaatgattggctctcaggacctggggcgagtgagtgggctttggtacactgccggtcctaaaaccttgtgtcacctggagacccttgggagaattttaaactaccactcaatactgggtgggatggaaatgcatgttctggaatggtggtggaggtttttagttactgcttggaacgagttcccaggtcttcggagaacagttattaaaaagcaaagcctgtgatcatgatccaggaaaagagggagatggacttcatccatccccttaagcctctcctggccagtgtcaggaatgtccccttactgacgcttcccatcgaggtgatagtagacctaacctaggctgactagcggagctgtctgtggaaagtaggggcgtgtgggcaggtttctccctgcaaagcaattaagactcttgtttctccttatctccatctctccttccatcctcgacccttctcggtgctccctccttctctgtgctctcctgccctgcccctcctctcactctcaccagagagttttccaaagagagggagaaggccaaggcccggggagatttccagaagctgcgggagaagcagcagctagaagaggatctcaaaggctacctggattggatcactcaggccgaagacatcgatcctgagaatgaggacgaaggcatggatgaggagaagccccgaaacagtgagcagccgtcttcttctgtgtttgggctgggttctgggggagaggagacagcatcggggtcagcacagaactttgaccgccaccctttcttagaagcccacggggtgccttcctggagcagcagttatctcactgatggcagtcacttgctgcacacagacatcggtcacatgtgggaaatcatagctgtcgatctagaaaacctcatgctccttttagaatatttcaccttgaaagactgttgagattttgctaaggcagaggcttttttaaaatcagagatccttctcctccaggttccacctctttgggcaggggcacaggcttcccgtttgaaagcgcaggcttgtttaaaaggaacaatgtgtgccaagcagctgcctggaaaactttatacctgctcaggattccttccccctttgcagatttccatgcaccactgagctttctcataggaaaggtagtgaaaggttttccttaagggggttagattcaaagacctggggaagtgctaagtgggagtgttgggggaagcccagaggaattcggcagaatgcaattaggtgatggaagttgagccaattcccttccttgggggttcacgtggccccttgttggataggctgtggctgagatagaaatgaaagtgatggatgacattgactcacaaatacgtaaaaaatgacggatcatgaaaattcaggctcttaccagactagctccatggttctcaaagcatggccgctgaccagcagcgtcagcattacctggaaacttgttagaaatgcaaagtcttgggccccactccagatctattgacccagaaactgtgggaatggggcccaggaatctctgttttgacaactcccccaggtgatcaagatgcatagtaaatttgagaagctttgggttaactctaaccactctctatatctcatttggccttgatctctgtgactcgaatcatactctttctttctttttctgtgtgtgatatctttctctttcactatacatgtttgaataggtgcatttttgtcctctcaagcagccttacttaaaaacagtttcctaaacactgagcatctagagtactccacgaagcaaacaggttaaagagccatccagggcatttgctgcgtggagtcatgctggtaaagacagggaactggaacttcaccctgagcagagaggatgatgagaagagctgccaggagcagaaacaggtgcaggaagaaaggacgaagatagccaaagatgttcacgggagcagaatctctgctccctcatttcaaagatagctttaataaatctatcaactgctccctttctgataacgctgctcaaggagcaaatacaaaattaaagcacacaaacaacaagggactgttaacaacataatgtagtaacctaaggaggcctttgtgctccattaagtggttttgcaagttggaatacagggcctttgatggattataacaatgagggtcttcctggaaaaatgcctgacaccttctattacactgttgatggaactgaggagtagttgattagtttgtggcactgagtggtatggtaaataaataagttggcctgtgagccacggagaagcctacctctaaaatgcaggaatttgtatgctggctcctggctccaccctaagtcagagcactggtgctaccttgtgactgacggtgatgagcatttctgtagcgcgtgttattgaaaacctgcagtagccactacacgcttagcagccagtggttatccaccgagataacagaacgttgctattctgttctccgcctaaaacaggagcttccaagggagagtgtgctgcttctccatctaacccattaaatgaataaattgttaggagagttcccagcatggagtattatttgctgctggagcagatcacactgacaaggcccatctacccaaatttcttgacaaactttgagaagagcataatgagctgcctaacccaatagacagtctcgctaagattttcctaagcctagataaggatggccttagactctggagactggtttctctcaccttgcactgcttccttacggctggaggagccctgggggtctgtttcttgtcctaagaggactggagtgggagcctggctccttcattagtggaaatgctaattagtgggacagttccaggggatgaggcaggggaatgaatattttaaaaagcaagatgtagagagtaagatagacacatgcaatgaagtggaacgtgagagacaggagtggagctgggaagagactgtgtctgttggggaagtccaattaaaagtagaattgatgtgatgaaatgattaaggaatcagaggcctaattcacttgcaaaaaaggtaagacagtggctcagaaactatcttcctgtcttgagaatttcatagattgctctttgaaacaaatacaaggggagaaatcctgctacgtttgaagcatgtgtgtttcaattaccgtaatatcttagcctttgaaatttctaaaagactatagtatggtatgtttgccaattctcttcagctcaaaagccaagtcatcttttaagagaaaaggccgatcactcttcatcagcagctgtggtgactccgcttctcccctgggcagcatctggatgcccgtggtgtgaggctggggaggtggggctgagtgcagtgcaggagctgcttggtgacacccagcatatcttaggggagcccagggattctgtttccttagggaaagctgcaaaagccaccaaggagtagaaaaaatgggctggaaggacaacagaaagaaagcgtgcagttggggacatttctctaaatattagtgtaagtgaagtggcccgtaagttatatacaaaaatatgttccagttcattcattcattagtccacccatccacacatgaaaggtctgctctctgccaggcactgccatagacactggtgatagagcagtgaacaagggagtcaaaagtccctgccctcgtggaacttagattctagtagagagacaggtggtaaattaaatagcatgccagagaggggggaagcagtgaagggggaagagtgttgagaggttgtgattttaaggggtcagccaaggaatgtctcacgatcgaggcagcattggaataaagacgtggaggctggaaggaaaagcaccatgcagatagttgggaaaggagccttctagaggctagcgagaaggggccaatgagaaggggccacgctgatgaatccggagctgaggaggcttgtgcagctggagaggagggagtaagggggtgaatggtgtaaggtgaggctgtgggacccaaggagtagggtatataaactattgtgagaacttggctcttactgggagtgaaccaaagagcctctgggtatttaattgctattgagcagagaagcaacacgatctgacagacacttatcaggatccgtctgcctgccatgtgcagaatggaatgaaggtgggccagggagaggcaggggtcccgtcaggtgcctgctgcctcaggagatgctgggcctggtcttgacacccatggaagtgataaggtcagacttcaggatgatgtcatttgcagacgcgtcagatatgggatgtgagagagagaggtagggcattttccaaggcaattgtcctaaacgatggcaagaggggaattgtcatttatggatatggggaagtctgtgagaggaacgggtgtcagggcaggaggatcaggaaagccatctgagacctttaagtttgaagtgcctattaaacatccaggtggagatgttgagtatgtaataaggaatgaacctctccaggagagagatctgtggctgaactgtaatttgggaagtcaacaacatatagaagatacttaacccctggatctctggataagatcactggggtgtgagtgtagacagaagtgagatgctgtccaagaactgagtcctagccctactgatgtttggagattgggatacagggaaagaaccagcaaacaggactcctaaaggcatggccagagagacaggagggaatgcaaaggaaggggtgtgagcgttgctgctgtgactggaaactgaccattgggcttagcaatgtggggctcacttgctggtgccttaacacaggctgttggatgaaatgctggggagaaagcttcctggcaaatcagccttaccctgtgcatctctcgagtctgcatgcctcctgcaatggcatggagcgttgctctgcaggcttcttgcttctttggcatggcccagcttccagccatctgaagagtctggccatcaggaaaccagaaagaggagaggaggagactcacacagactctagcatgcccatggcctcaagacagtcagtgtctaaagcttagcccatcacgatgttcccttctacagcaatgccaatactagccactgcctctgcaatgggttacagtcttggaaaaaagaggacgtgatactcaagagccatttcagagccaaaaaggcaaaaaaggggcaagaaaggggcatgtttatgtactgttgccctggatgtggcttcctaagtggggcagccaagagccaagccccttttctctctgggtaaagactaggataatgttgaggtctccccactctagtgactgcttctcccctccctctgagcagcagtgagaagcccctgtgaagggacccattgcagaactgtcattagtgcagggttattgtcatcagcagagatgcactgctcaaagggacagggctcatcttccagctccgacgttaaatctaatagaaggtcagacactacagggagaagccataaagaaaaagagacagattctcttctttttcctcttcaagatgaaaaaacacatctattaaatatccatccttacaggaatctctctttcatgtcattaagacaacttaaatgcaccctggctctctaaagcttgcagttcaatacagacattgatgtggatgagcacgtaaacagacagacagacagtggaaccaaaatattgaatttccatgcagataagcaggattaaatatttaccccatggtatcgagttatgtgactcgggagccacttttgcagtcatcaccagctagcagagccacgtgcctgctgcctgcccaacagagtctaggatcacatattactgagacaggaaattggaaggcttgtaagagctgcaggttgcccacgatagggccccatgtggcttgagagcagtaacctgaatatcgctgatttacattattttatatgtgtcaagggcatgtacatagttatttgatctttaaaaaaaaatcagggccgggcgtggtggctcacgcctgtaatcccaacactttgggaggccgaggcgggtggatcatgaggtcaggagattgagaccatcctggctaacacagtgaaaccccgtctctactaaaaatacaaaaaattagccaggagcggtggcgggctcctgtagtcccagctacttgagaggctgaggcaggagaatggcgtgaacccaggaggcggagcttgcagtgagccgagatcgcgccactgcactccagcctgggcgacagagccagacgctgtctcaaaaaaaaaaaaaaaaatcagtacgatcagtatttatctagatctctcgatacctacaacacaatcccatgtcatggcacatacgagtcacacaaacacatgtgaagcatctggctcagattacatgagaagacatgccaatatttgtttttgtccttgattctgttcataccttgcactgttgagtgatcatgctgccaggccatgaagtgagagcagatccttaaggcagagcctggaagtagctcctgggccttcacgttaactcttagctggtcctaatcagagccctggaaactttagtgctggaaagttgctggagagatcaggtgaggaaactggagcccaaggtgggaaacagccacctgcctaaatgttactgaagtcagcactcaaacccagggctccagattccccatgcaggaccctgcccagcagaccacagtgctccttacagaaggcttcttggatacccaggcagcagcactccctaactgtccctctgtccccctagctcttggggcacatccccatttatcttgtggaattacatccacctctttacacttgcttgctgggctacactgagaggtccttcttggggctgcctttaattcaccgttgtgtccccatgacctgacacaggccagagcatgggaatgtcatggcacatatgagtcacacgaacacacgcaaacgcgagtgcatgccatatgccagttttggcaaagcaccttctgccatgctctaagctgttggaacaggtgagctcacactgcccctggactgagttggctcattgttctgtctgctcagaattgacttccttgtggcatcaccgatgacatcctttcaaagtcatttcctttcatgaacacggttgctttccaatagccctcagtcactctcaactcttggaaggcaccatttggaaacaggcgaataagcacagagccccccatacgtgtggacagtggcgatgacagggaaattgaagtgccgtgggaaagcattgggagttcttaagcaacgagattttgctgttccctgaagaccatggtggctagtggggctgtgtactggggctctgcagtgaaaccactgatggatatttctggttctggtagtcatgaatacccatgggcgaggtcctgtggacttggtgttgtgagaggcatctcacccaaagcggggcgtgggggccatgttgtagtaaggatccagaaggggtctgttcattggtagcacattacctttggagcacagcctggctgctgtgctatctggccccgtaagtgtacaaatgccattttcccagccaggggagcagtggaagagctatggaaaggctgtattgtgtatacagtgcgaagtaggcacgtcagcctgtttcagtgagctgtcggacacttcccaaagcaaaaccaccagctctgggcaaggcttgctaggttaagctgttgggaagccatgacagtcttctcattgcccaatggccgtgtgcttcagaggagggaagccgtgacagtcttctcattgaccaatggccgtgtgcttcagaggagggaagccatgacagtcttctcattgaccaatggccgtgtgcttcagaggagggaagccatgacagtcttctcattgcccaatggccgtgtgcttcagaggagggaagccatgacagtcttctcattgcccaatggccgtgtgcttcagaggagggaagccatgacagtcttctcattgcccaatggccgtgtgcttcagaggagggaagccatgacagtcttctcattgcccaatggccgtgtgcttcagaggagggaagccatgacagtcttctcattgcacaatggccgtgtgcttcagaggagggaagccatgacagtcttctcattgcccaatggccgtgtgcttcagaggagggaagccatgacagtcttctcattgcccaatggccgtgtgcttcagaggagggaagccatgacagtcttctcattgcccaatggccgtgtgcttcagaggagggaagccatgacagtcttctcattgaccaatggccgtgtgcttcagaggagggaagccatgacagtcttctcattgaccaatggccgtgtgcttcataggagggaagccatgacagtcttctcattgaccaatggccgtgtgcttcataggagggaagccatgacagtcttctcattgcccaatggccgtgtgcttcagaggagggaagccatgacagtcttctcattgaccaatggccgtgtgcttcagaggagtgggaaggtgacagccacataacattttgacaggagacattcatagcttcctgggcctggcattagatcagcataaaggtgcctggcagctctgccaagccatcagctaataaaggctctgctccccttggggagacgcctacttgactttaggggagtgtccaggccaaaacgataaccttgataagccaacaaactccagaatccagatggctaggtttatggtggagaatattgtcaataccagctgagaaagacaccagaagaaggattcccacaccctttttagatacctgcctttgtattggtctacctttcactgtgtaacagctatggtaggaacagaggctgtgtggaggggcctatgagcagcaggggctgggtcgggtgttgtggaggccacactgtggttttggagggacaagagttaccagggagccaccgggacctctcctgcagtttaaagtggatgtggatagagagcagctgtgttcctgggatcgctggctagccagccaccctgcaggggcagagcaaacaggctgttagctcttgaactgccaggcacactgggggtccttggcagggtgtggagcatgaaggccctcttcctctccagggcctggaggacagcatcctctgcctgcccgccagggtcccagcccaaaccagcatcttccgagcccacttctctctccagaggcttcttcatcttcccagttccccaggatacaaagccgccttcctctttcctctcctgtgcccttccacagttatcagtgcctgcgttcagtcagtcaagtcgtatgggctgtcctcttcgcttcttcgcttggacttctcactccttccctcctctcccctcacctctctccgcctggactcgcagccaccttgctgccctgccttccagccccgttcccacgcaacctgtgtaatgcagccaagttcatatttctgcagccgactgtgtcactcccttgttcaaaagctttgaatgtgtctccatgggtacagaataaagcctgaacatctctcagtatttcaggcatctccaacctgtcccagccaatagcttgaaccttatcactccctactgccctgccgcaaagccagactgcatcttgttttccagaaacgcctgctgctgtcctgtttctgcacctttacccatctcccatccctctgcctacagcacctgtttcctcccctgctcctccgtggcctcctagcccaggtcgaagagcacgtcttggctcaggcctcccagagcccccatctcaggacaggcactgtcagcactcaaccctcacctacccaccagtcggtgggggtggcccagccgtcttgttatatagaaagctcttgggaggcagcagcgtgcattggtaacttcttattcactctcccactcagtatgtagggcaatgatttctatttcacagacttcccccaaaaacacataatgaattgaattgaattctcttcggatcagagaattaaggtctgatagccctatattcatacctagttggccaaataccatttttccagtcttagccatgctcatggtagcccccagagagtgtattgtggttgacagaatgggcagaaatgatttggcgttgagaaagtgggccgagaggaaagtttggaaggagttagaattatatagtcccaggagaagagaaagccgggagtcgacagaacagggacaaagctgcctcatgcccacatactccccgtaggaggggtcattgtttcactgtatggcgtcaacttttagattctgagtttggatcatggatacatttcagccctctggggctctcctgggctggggggcagaggaaggacaggggcagaggcatgagaggggatgtctttttcttgcatggaaggtgaagaaggcctggatggtctcctttcatcttgcccaagatcatctcacatgggtattgtttgccccattttgcagatgggaaaagtgaggctcggaaaagttaacgtattcacattgttcagcttgtaagttgcacagttatgtggccgttgctccctccgtaccatgctggtctctaccacaagccccctcacgaatgcccttctcttccaaccaggggaaccagaagtgggccctccagtcccccagccggaacagcctgtgaattttccttggttgttgcatttatcgcttcagcctaatatgcaaagcaggtggacggagaaaggaggaaaagagcggagatggggcgggagggcgggggcggtggtgctggtagtagggcatgggtttgatttttttttaagttgaactttatgattctgagaactctgtttgaagcatggaaagaagttatggcattatcttgctcacggaaagaaaaagcgaactgaggtcaagcgccatccctttggaatggtttaagaggcagttttgtttggaaggagatgtgtcaattccgtgacctatccgatttccttcagttcagggttccttgggactggcttagaggagggtgttgatcagccacaatgctctggggatgggagttctagcttaccactttcctgccttggcaagtacggtgtgaggaatgtcatggaaccgcctctgatgattctgggctgtgcagtgctacagcgtcatcacttctgagtctctgatcccaggaacctcagcactatggggccccgggggggatcactgacacgtggtgtctttggagaagtcctgtcacctacctaaagccacgggtcgctttaagaatggatctgcctgtgtccacttggccttgcccagagtaggcactcagtaaagagctgatttgactttaatttggtgctttgcaaatcgatctatacacttgggcgttaaagtagctcagcagagggatggaaggggagatgaatcatcctgagtttccctttgatccattttctccaataaccagtgctcagccccgaaacagagctgcctacactacagttacccttgcctccctcacccactccacgcttccttctctgtaaacagtgggggtaagaagctcatgccgcatcaagatatcttaactgtcagaggctatcagtggaggggagagtgacagctccagcctttctcactacttgctgatgtggaaaattatcatccagtaatggagggagattagccacgtattgtatttccatcgtcgggtgcatggcatgggaggatgatttatagaactggaaccctgaagctagtggaaaggtcacagaaagtggaatcattggcctcaacacagtggctagtgtctgagggaacctcctagagccacatgcatgccaggccatcctgagtgcttgagagagacatgggcacattaacacacatttaagtcccaacagggcacccagaatactaagataaatagacaccgtctctgtcctaaggggaattacagcctagttcaggagacagatgcaccaacagacaggtgacagtgatgaattgcagtcatgaaccaggggctggagaaacacagaagacagagagcagagtttggaagagggtgggagggactgcctgccccaagaaggattcatgaaggtgccatgtcagtcagggttggtggaccattgtaataagcagcccccaaatgaaatctcagttgcttagtacagtaaaggttacttttcaccccacggtggagtgtgagctggggatgggagggaggagagttccaccacaccggtcttcaggccccaaggctgcaccccttttgtggctttgccacccccggggcctcacagtctcccctgtctgctctgcatcgggccagcagaagagggagcagagggcctgctggaggcttcagcagccaggcctgggagtgtgggcattgctcgcgacacaccatcggccggaacacagctcccacttccgcctgacttccaggggactggcgaagagcagctaactaagtgctcgggggcagaaggactggggctgggtgggcacaggacagtgttcctgctgcagtttggcagcaggtcacacggccaaaagatcgcaaccggaccttctaagctgagggggctacatttgcaaagttgtagaagcaaaataatttttaaaagaaggaaaggaaatggaattgcacatgtttcatggtgatttgagttcagggtgcacaggggagaagccaaaaagaaagatcaggacagaaagactgggacctggtcccaaagggcctcggagtgggactctatcctgtggttaaggaggagccaccgaagagatttaagcagagggatgacaaggtaccagtttaccatcgaaaggtcactgtgcagccgagtgtggacaatgggctggaaggagagagaagctggaggcggagtgggggtcagtcagaggctgataaggcctgagtgggagtggacaggcggggaaggattggaaagagcctgcatccactgggatagggtcctaagggctggcaggccctgaacacctatcctggaggctccaggataaacaccttgtgcttttcagcctcaggaatgatggaggaggttgtgcagtgccatgcccctctgaggggctcttcctgggagttggtttgtcctgcctgctccttggtgggatccctgccatgaccctctgccccttggcattccaaggcctgtttaatacccatgaccataaacacacccacaagcagtccccttaccctaaaaggtgccacatggagaattccaagcaactcagcctattaaatccttgcctgcatgattaaatgcctcctggggaaaaagtcgagtaacaaccccaaacataggctttgatggctccatccttcaggattacttcaccaaatggaaatactcatgcctctggtgacagctgcagtgtttccagaagagatttctaccctcatataataggagagactttgtcctcttaaataactatgatacctgctgtaagtactgaactgttaatcaccgtgatcactttgtgtcgatgccacactgctagagggacagaactgaagccttgccagaaacaacagagaatctgctcaaagagttgcctaatgaaaagggtggtctgttggggagatagatggaattcttcaaaatagaaggcaattggcagcgttaggctggggtgagggtcaggagaagaggggcagctggggagagaagggctggctcatttatgtcttactttctttctatatcctggtaccaggtgctggattccttatttagccatgtggttagctccatcgccatccaaaaattacggaattctaaaaccctggggcataaagggggctccaggtccctgagtctgtcctcattccctgggcttaatcatgcatcccccgaaccacaccctaccccatgtgggggctgttggcccaaagacaagtgtctgtgctgctattccagggccttgtcacatcacactggagtgaccacctcccagctgacagtgctcccggattccgtttcttttagagatatgagcaggtttcaacactgtctctggaaaaatcacaggacatgctcaaaggtagcatcatgggaacagggcaagggccttccacaacagaacaggaagttgtattcatttccaaacacctggctttgagccgaaacttgcactttactgataaggccataaactctcctcctcctgcacccagtttgattcaccagcagggcccacacatgtggtgccatccagagtcatccctcctcaaaggaaatgatgggcaagaaacgtgtttgcacaagagtctctaaacacagcccatgaatgaatggtctccggtgaaggtagactggagtgatagagtagcatgttcacttctacatggcgctgcagagagcctaagaagagaatgaataaagaaaagtgtagccatttactcagtcataaaaatacacgtccattgcaatttagaattaatacagattagttcctccgactgaagaaaagtaaccccagcaaagatctgcagggccgagccactggacagaagagctttgataagagaaatttaaaggtttatgctttctaaatagatacatttgaattttgataaaagagaaatttaaaggtttatcctttctgaatatatatatttgaattttgataaagttattcagtgttttgttttattctacaagaaagtaaggatattaagacattttaaaaatgtctgggcagaggagcccttgctgttccctaaatcatgttctaaaaccttatttgctaagcctgagtctggttttgactaacatggcccaagtcttactctaagaacttcaatagtgccttgtgtgcaggatcacagtgtataaagattagaggtcaagcgaagacaaaccgcaggccagcactgttaaagaatgattacaactgtgctgggacttgtttgtgtcttttgcttgaagtaatagactagatctactctcaacaacttactgatgaagttgaaaagccttaattatttgcttgacaggctagctttaaaggaaaaagcctttgtttaccttctcaatttcaagcttcaaatcagcctgtccaaccattgtatctcatgtccatgactcatgagatatgataatggtgtccactgtcagttattatgttaacaaaattatctgaaaataaccaaatgcacacctactaacacatgcacacacaccaaacacaggagcaagaagaaattaaggactcctttcttgtcaggaatattcagaattagagtctcaatgaatttactaatattcgctaaggtcagctgggtccagctttgagtaaaaagcttggcatgatgcttgctatgcctggcagaggcagagaaaaagatccctgctgtccccacaggggagagcatctgcttgacatgaaaaagtaatgtcagtggtgggtcccagccccttggaccacttctgcattgactaggaagctaaggggtcagttgctaaccatcaggccgagcatcctaggttttcatcaagaagatcccaagcttcaataaaaactgcagagtttcttcttgtacctcttagatggtatacaatcatgtccatgaattataatttccataatcccttagtaaactaattctattaatctattaagtcctaccccttgattagatgagttgagaatacagcaatctgggatgaatgaccctcatgttcctctcccaacaggatgccagagtttttagtctgaacaattgtcgtgtgctatacaggaactaacaggagccagagaaaagcaggcagccagacttcacggccccacttgatagccagtctgcagttggcctctcccagtttccttgcttgtaaaatgacgggggttaggtcagtaaaagccccttccagctttggaatttgtttctgtagttctcagttgacacacgttagctttagctccaggagcctgggccaaacctgatcatttcagtccatcagaccccagaggaattcagttgattctagcttcttaagtcctcagactcctggaattgcacttttcctcctgcaggattgcctgcaccctgaaagccagcccgttcttccaacgatcctctgcacacttgtgcacaccctgatctctgcacggaaagcccagccccaccatctgccttccgaactgccatgttaccaggccaggcttgccctacccatcatgccatgtgccaatcacggagacacaagttttgcagcggagaaagcgtttgttcacaaggcagccaagcaaggagatggaagagcaggtctcagatccacttccccaaagatggggttttagggatatttatgggatagaggagcaaggtccaaggcatggggaaaggtgattgggggtaaggaaaagtgaggccgtcggttatctgcgcaagtatagtcaagcttcacagctcttcctgggattcaagttcacaaaatggcatcgttagcgtgatctgaggatggatgtttgggccctctgatgccaaaaggtcgcccattggacactcacgcaggcccagttggaggattagtggtctgagctagcttgaactggacaagagctgaccccaagctcttgaaaaatgacttaagcaaccattatcatggtgacttatacatcagagatgttatctgtaaggaggcttgtagaagtttagttacatattccttaactacatgacttttagctgcatatgttttaaaatcaactagaaaccagtgaggcaagttaggtttggtgacctcattaggttagcccttggtttcaccaccccaccttcaaagccccatcaaccatcccttccttttctgccttttctatcctcaccacctcttctccccagcagggtcttacccgctccttcatgctcccagaaaccccattccacagctgcatcatagtacttattgtatgtgatctgtagtgtctccctgtctgctgtattcattgcattttatctgtggcattcatctatctgataccgtctgctgggtagtacatcttgaatgtggggacttttgtattaccagaatcccatacagatcctggtgcataggcaatcaatgaatattggttggaaaagggtttggaaattgggggataaaagtagggtcttggcttggaagtccttggaattctgcctctgggaatggatcacttaggcctgctttgtcactttgtcagatctaaaacgaggttgggccagatctgatccagcagaggatatgtaattaaccaggcacataaattaatttttaatcttccattccttgcctgtcaacatttctttttcacttctcaaggaggacatgattatcccatgatgtttttcttcatgtactaatttctcctcctctttcttcttcaaacctgtccacggaagtgtcagaaatacttctcattttatcctttctcaggaaggccagctagccagctaagaatagcagtcaggaaatggttaagagaataccaagaataaattctgagttgcttctttacaactagaaagctgaatacatttaaggcttgaaaggtcaactcccttcaaagggggcagaggtttgatttcgtccattatgtggtcttcagcacaatgctcatttcattcactggctgcaatggagatttatggagtaaatgttatcacaagctgagacttaatgagaactcagctgtatctcctggatgtagtggaaagcaaccattttggtaataaatagagaacagcatctaatttgtaaattcctttttccgttgctaagtttaatcagatcagtgaaactgaagggaattgttgatgaccaaaaattattttccatgccttaatctggccaggaaacattactcctaatggaaatggcctgttgctctggcgatggaaggggatgacatttgtcattagactaacccaattgttgcatattgataaatatgtttaggccaaaatctatttaaaacccaatagaagctgaggccccatgttgccctggtactggtgttactggttcctagaagtaaaaactctttccagttaaactacagagatctgtagcagtggccatcctaaagatttcttcttgccctcagtgatcatccagagcaaggccagaaggaccatgatggagcccaaattgtggtcataagtgaccttttctgaatggcagagagtgggttcagagaacagaacacaatctctggcagggccttggcttactttagggttaaaacaaattcaagggggcacaaaagggagttgaatgcagctctcttttttccagcggtgcttcagtttttttcgtgatgaatcataaagatcatttccaggatagggaccatgccatgggtaagtgaccgttaacacgcagtaggaactttatgaatactgcatgacgagaatgacagcaatgaggaacacatctgagaagctgatggccccagagggaacacggctaactgtgacatctttagggggtggccctgagaatgctgtatcccttccagtaagagtaccgcctccaggcgacctttagacgcacagcaaggggtcccgaggacattcttctcttggcctgcacttgcttttatattcatgtgcttttgtatacatgcccagtgtccaggcatcctacacactcagagctctaatactgaatattaggaacgacagctactgctcatcaagcacctccttttgcccatattatctttgccctcacttcacattttcagatgagaaaagtgaggttcagatcattggcctgaggccagttcgctaacaggaggtttacccaggcttacacccaggcacgccccatctgactcgaaagccttccctctttctcttttgtcagagaggcaagcacatggtaaccccccagaatcatgagcctggtgataggagaagtggagtggaaagaagccctagaaagggagtatggagacctggttcctagtcccagctctgatactaactggccctgtaacctaaacaaccctttcctctctgggcctcaatttcctcataggtaaaagtaatacccaaaggatctctaattgtctgttaatctttctgcattccaatccccttgaagccccatccagccctgtctttctcttggagtttcacattccagaacaagtctgtggctaagctgaggagaggatgccctcattttgcaaagagacgcttctcccatcttggccaggcagcagaggtcacaagagaggaagtgtccactgcataaggactctggacagcttctctgccagcacgcatccagcagctgactctttcctcggggcccacgctctcctgcccttttcccagagccactaccctgacaatgtctgtctaccttgagagcactgaacagtagaacctcagtgccgggaggtgtcctgaggttctctccttctctcccgtcatccccacctatgtgtgaaactcctctacaacaccttcactacggagtctctccaccctgcttcttacacactctccgtgtaggaacttaccagtcacaaaaaacccttccatctttgtgcaagcctcagctgctggaaggtcttccagctgacacctgcagctattgagtgacagtggaaagacagtgtcctgggtgcagtggcatcctcccgatggtgtggtgaattatcctggcatggttaattactcacactaattgcttttctgtcactgcgctccctcctgcctcctatgtttccatgaggggttgtgcttttgagatcttttcccacctcttctccctttgtcctcccagtgactctgagggaagcgctgagctgctacaccatgttccttctcaaccaaggagccagcactgagcagagaggagctcttgcctcttgcctctggcccaggcaggcatcagggatctctctgtctctctctgtctgcctctctccctcccacccctcgacacagtccttccttcctctctgacatctgtgcttggtcactcccatctgcaagaaggcccgctcccccacagtattattgagatagtaacaggccactgtctcctctctgctttccccaaatcaggcacatcccaacttcaccatccaggtagttgttactcttgtaatgtaagcagcaaaagcgatagagcagcttgaagctgcccagggcccatgttctggctggacaggcccaccgatgcctgtgttcacacagcccacactgcccgacactcccactcctcaccccaagagccttcctgtgttccatccaccaggaccaggactccatccccaaatcagaacctctgtgtcctttccttccttccaggtttcctgggccactgagcctgcagcatgaatcctcctagaatttaagactcagaaggagacaggtcacggagaggtagcagtgtaccccaggcagtcgggcccaggtgagcccaaggtcaggcctcacatttcaagtcgatttcaggatcattaacattcccacttcctgtcatgcccccaggccttttgcttgttgaagacagtggtccctgttctctggatttcaaaaaccatttctctcttctgaaggaagaacaatcagcgtccccaacaagcccagctctcctgagaaattacagaatagttctaagattcgggcaaagagggaggagggatgaagggtgaagaaggcctttgattcagactcagccttgagaggaaggatctggagggagaggctgttcagtggaataatgagagtgacagaggcaggcgttcatccccgtctgttctttttgcacttttggtttggggtcggtttctccttcaatgtgcttggcttagagctgccccagctgctgtgggcatgaaaaccactgctcaccagtctccacatcttggcccttacccaaaataacccaggagggaggaaggagctcatgggtgggtggctggataaatggctccagaataatggatcaaacattgaatgagtgaaggagtacacaccccgtcccttggccccaagatgctcattcatacccctctctgagcgtgaaggagaaacagcaaaagctgaatttggggtgtgtgccccagtgccagccagtctttccagggtgcttccgatgcctccagtggaagtccccagccatgttccctccctggggcattcccatctgccctcccagggaaggctgcttggtgcagcagaggtgtgctctctgggagcttcggtggagaggaaaggacaggggagtcaggatacgagggctggtggagtctgccaggtggggctagggcagcctcgctcttccttgtcccaggagcacatgtcaaaagcgccagggctggggaagcagcagggagcagaggctggagaaggcctgcgtccctgtcccggttctgctctcggcagcctcagttttctcatctccacctgtggctggagacgccttccccagtagtctccccaggttgttgggagcatgaaatgaggtgctgtcatgtgagcgcttgaacagccacactgctggactctcctaatgaacgagcaaagaaccatatgtgtcagcacaccaagctacatggcacaaatagtaaatgcctcagggaaaaggaccattctgggatgccacgtaggtcaaggaggcttcatggagatggtcggagttggagggtaggtaggaaggcttttgtgcatgtgggggagtggtggggatggaattccaagagtggggcagcagggcaaagacccagacacaggcgcacagctcccagcaagcgccctggatgcattaagccctccatcagtggtgtcaaagcaagaggaaccgtgtgtggcatattctggaggcagagagtaggactgagtgcatggatcagagggcgaatgctggaaagggaaggtgtagttagatgggtagagtgaaagcggattgccaagggccctgggagccaggacaagggtcccgtgtgctgagtgatagtgatgtgacatggtgaagtccctgctgagaaagactcctccagaagatgagagaattacgtgtgggcttcaagcccctctctctctgtgccgagagtccccttacaaccaacaacttaactgtttcatccaatcaacccactcctttcttgtagagcttaatttttttttccaaggcaaagaaatcttagagatctcctctcaaccttcacctcccccacccctgcagcaaatgcttatccaggctttgcctggaaacttctactaatgagcaagtcctcatctctccagatagccaggccatttgggaaatgtttcatccattagggcacgatcttcccctgcagttctccttctttagtgcagtgccctctaaaactactctgggcaggtgctgtcttcctcctgtggaaaaaaacttcatatgttggaaggtggtggcgaggtctcttaggttctccttatctaaattaaacctttccattttttcttctactgttctctataagtgacacaacatgacttactggcccttccccatcaaagaactctattattgccccctttagacatgatcctgagcactgaacctctatcctaagggggcctgcctgatacatgggagagggaagccctgcctccctgggtctttgcctgtagcagtgagcctagaaatgcatgaagccgcaggacctctcacaaaagatgtgggcaattaaagcagctagagccgggcacggtggctcacgcctatcatcccagcactttgggaggccgaggcgggcagatcacgaggtcaggagattgagaccatcctggctaacacagtgaaaccccatccctactaaaaatacaaaaaattagccaggcatggtgctgggcgcctatagtcccagctacttgggaggctgaggcaggagaatgacatgaacctggggagtggagcttgcagtgagctgagatcgcaccactgcactccagcctggacaacagagtgaggccctgtctcaaaaaaagaaaaagaaaaagcagccagaggcccggcatggtggctcccgcctgcaatcccagcactttgggagggcgaggtgggatgatcgcttgatcccaggacttcaagaccagtctgggcaatgtagtgaaaccccatctctattaaaaaaaaaaaacaaaataattagctgggtgtggttgtgtgggcctgtaatcctagctacttgggaggctgaggcaggagggtcacttgaacccgggagttttaggctgctgcaagctgtgatcacaccagtgcactccagcctgggtgacagagcaagaccctgtctaaaaaaaaaaaaaaaaaaaaaaaaaaaaacctaaaactaaaacaacacataaagtagccagatggaccaaagactctgtctgccccagggcaagaaagaggaaaacaaactgcaagcatccagcaggcagagttgggagaagaattaaagcaaaggacacgctacatagcagggcaagctgatcgatattctgacagctgcccataaactcattcatgaaattatggggctgaagagacaccatggggttggagttaaaatgactcacttcacataaatgtcatcaatggcggcagcctagaaatttaaggcagcaatttacttgcctgctggaagggaagacacaaatgagacctgtctgaggaagtcttgctccatactcaaggcggctttccctctgtggctgttcacggccttcaaggtagtgctgggcccctgtagatcctccttgcaggaaatctgacctgctcttcagcagcagaaagcagtgaagcaggaaagacggggccccagagaagagagaaaatgagaacaaatcgtgagctctgcatagctttgtgaacggcaaagaacagggtgcaaacgtcaaaactcatccatagtaaaactctgacttccgtacaggagagggagcctggggcctgtgtccatccttgatacttttctgaccaagggtgggctcctggcctctccgtgatgtgcatcaatggtgagtgagaaagggaggcagcactgatggtggaaagaggttcaaaactctaccactatctgcctctgcgactctggacaagctgatgaccctctctggaccttaacattctcacctatacaatgaagggctaggtggggcacagtagctcatgcctgtaatcccaacattttggaaggctgaggtgggaagattgcttgaggccaggagttcgagaccaacctgggcaacatagtgagaccttgtctctacaaaaaatttaaaaattagccatgcatggtggtgcatgcctgtggtcccagctactctcaaggttgtggtgggaggatcacttgagactgggagctggaggctgcggtgagccaagatcatgtcactacactccagcctgggcaacagagtgaaactctgtttcagaaaaaataaaaataaaaaatcaaatgaagggctggcctacaatcctacagaccccttctgactgtgatgatgtcatgattaagatctccatttcacactggggaaaccgagccacagaagagtgaggtcacatagctccaagtggcagagccaggatccaaactcaggcccctggcccccaagcccatgctcctaaccacgctgcctgctgactgcttccttctgcccagaggagccggcagggaggccctgggcagggtcataaaataagtggcttctccccaggaccaccacctgcacccactgccctcctcctccacttagtgatgccagcacatcctcagggctctcttacccttgctctcccatgacagataggaaaaggctttataaattcatcaatagacattctagctaagaggatggacttggcatcagatctacccgggttcaaatcctgaatcttattggcgcttgcttggagtaaacgactgaattttctaagcctcaattttctcatccaaaaaatggggacatctaatgcctccctcatagggttacctcagttaatgtatgtaaaattcatggaagagtagctggcatatagtgagtgattgagagactgagctttgttgttaatatgaagatagaaatggctgatgttgctattgcacactctgggagacaaggccttaaaatcaaggaatggccattaggtgtcatggaaccgggttggaggaggattgggggtgcaaatcatactctatccctttccaatcataccacgtgggtgaccatctggcatgtggcacttagcacttaaaaggacaccactaatgtccttttagtagtgagaactgggtttccaaaggagtgctctagagaaagaccaccacactccatgtctagaagatccctgtcccatccctaatggttgcaggcaagctgtgttttccccttggagtgtctcgccctcctgtgtggtcagatagcctgttttccccatagtccccgagggtctgagcatgtcccaggctgccctgccatctctagtgaaggtggggtgggggtgggagagggagtgtgccaaagttcaagagtttgttgggtgcagctaaacttactgcccctgccccctcccggccccatccacctccccgccaacccggcagcaataaccaaggcagcctgatagactccgtggtgccctaatggtggagagagattttctgcttgggagcacaggatgtttatggcctgctgagatcacagtaaccctggctttcttctttggattatggctgcagatcaagggcaggcatttatgcctcctcccagtttatagcagtgatcataattatggtgatggcagagcgcacttctattgtgcctttttaataaggccactttgtttggcttcttaatatttaatcctgttttatatttactttctgatggcttaaaatcaaccaggctttaattgcttatgcagaggaagccaagctgggcctgggctggcaggaagttgttgagaaggttctggaagctgatggcacctttctctgtgacctttccacccaggcaggctgctgtggcctgggaactgtgtttctttttctcttctctttttctctcatccactctttcctcttattctacaaccttcttttctcttttgccattcctttcctttcttttccttagaagagatcctcagttcaccctccggttcaatttatccatgtaagagaccagagttgtactgtgacctgccaaagctttggagctacttagggcaaggccaaggcgaggactgtctttgttgtttttcctggactcacagtattagagactcctaagactccaaactgggcaaacacatatgaagagttccttcatctatccacttgacaatacatatggccacgtgcttgatctatccaacggtagaaaagtcataaggaataactttccaagttattgttttctgaaagagaaaattaaatcagatgaaacatgccgtgccacagttcctcaattcctgggaagtaacacagcccagttgctcaggtctattctgcggtggggctggagcaaccctgctacaggcccctgcaccaccagctctcagcagcagtccagcctgcaaatgtgcatttcagcgacgtcgcctgatggggctgaaaaaggcctggactcaagacctgtcattctctgccatttactagctctccccttgggcacctaacttcagcctttggggactacactttcttttgtcagtggggataataatatctaccttgcctgtgccgtaggggtatgtcggtcagtgtccccatggaaacagtaggtactcttaaactaggtgacttgaggagggcttcataaagatgcaggcagggtttaaggacttaaggagggcttcataaagatgcaggcagggtttaaggacttaaggagggcttcataaagatgcaggcagggtttaaggacttaaggagggcttcataaagatgcaggcagggtttaaggacttaaggagggcttcataaagatgcaggcagggtttaaggacttaaggagggcttcataaagatgcaggcagggtttaaggacttaaggagggcttcataaagatgcaggcagggtttaaggacttaaggagggcttcataaagatgcaggcagggtttaaggacttaaggagggtttcataaagatgcaggcagggtttaaggacttaaggagggcttcataaagatgcaggcagggtttaaggacttaaggagggcttcataaagatgcaggcagggtttaaggacttaaggagggtttcataaagatgcaggcagggtttaaggacttaaggagggtttcataaagatgcaggcagggtttaaggacttaaggagggcttcataaagatgcaggcagggtttaaggacttaaggagggtttcataaagatgcaggcagggtttaaggacttaaggagggcttcataaagatgcaggcagggtttaaggacttaaggagggtttcataaagatgcaggcagggtttaaggaagccagcaagtacagtaccccagggtagcagctgtgtggatctgttaccggtaaaggctggaggaacaaagtgaggggcagcctcagagtcagagagcagctatgtggagagggccatggggcagacatgtggccttgggcagcaagaagcagccagtctacaccaaccctgtgtgctgcagttggggagcgaacgccccacctctctctcctcgggtccacccacggacgtcctgctagtgctgcccatgggccggcccaagcaggaagcaaggtcagcttcctggagcaccaggcctggggagagggaaggagagtgggtctgaggacagactctcaactgtccggcacctaggagtccccttaaaaccccatgatgatatgaagtgttattctagggagagggtgaaaccaaaacacagatccaggtttttacttaaaattctcaccgactccggagtcacaggagctcagaagaggagactcggtgggcaggagggtggtcctgggagctgccacagatgcgaactgggcctctgagaagggatgaaatttggatagatcaggggtcagctaactttttctagaaagggccagagagtcaatatcaaaggctttgcaggccacacagagcctctaccgaaactcctcccctccactgctgtggtgtgagagcggtgatagacagcacacacagggcacggcagtcccaggaggactgtgctgacaaagacagggcaggctgcagttcgctgacccctggaatacgtgcaggaggtggacaggcactccagggacagggcatgacgtagggccccatgcacgggaaagaccagaggttggtacggagccagcacgttgaaggatggtgaggagggcagcccggtgtggttggagtttctgcaggaagtctcaggacatgagagagaaccgacagtgtcttagtcggccagggctgcccaacagcgtatcacagacccaggagctggaacagcaggagctgattttatcagtctagaggctggaagtctgagatcaaggtgctggcgggcttggttcctcctgagggtcatgagggaaaaggggtcagtccccaggcctctctttggcttgcaggtggctgtcttgtctctgagtcttcacatcgtcttccctctgtacctgtcagtggccacagttgttctgcttataaggatccggtcacactggattcagcccaccctcatgacctcatcttaatctaatgacctctttcaagactctgtctccaaacatggctacgctcagaggtatgcgggggctgggacctcagcatctgaatttccgaggggatataactcaactcacagcagataagatgaagccaaattacagggtgttttagataccagattggagtcaatgaggtaggaaatgaggaatccttttgcttgttaaccgtaagtctgattagtactttgagaaaataaatacaaattatgccgctcatatgcaaaaaatgtaataagatgggcacctggccaagtacatggcaaagtcaattccttagttccatcctggagtgccgggaagcctggacactggatcccagcagactggtgacctggactcagccattggccttgtatgacatcccaccacactggagaagtttgggtggggcaagcagtgctcccgatacccccagccactgcctgggatgtctgggcctgaggcatcaaccctcttcctcccggaggaggcataagattgacagcagctggtgagctctctggccttggataacgagctaccagctaagttccggaatacacactgggcatttttcttagcaaatctcatgagaggccagccactcctgctgacaggcacatcaggacattacaaagctccatccctgggacaaagtcgaagctattttgggtgaccaaaggtttcggaactaggcagattgtttcatctcgccccacatccatccctcattctctcatgtggagctttgctctggtgccactcagtcagtcatgacgcataaaaagctccgagacgggggcctcaggaacaggccggatattctctatgaggatggttctccccatcctcctgccagtctcaggatgggaaggaagggagtcaggatgtggcagggaggaaggaaacgagagtacagcagcgggcaccaaagaggattttgctcattgtttccttcgtggatttattgctgtcaccttagtgccatttttcttttttatcaaaactaaagtggttctgactctcaatcctttgccaaaaccccttctggagtcattttttattcatgaggatgactttggtcatctttggacacatcatgctggcctcatggtggctaaatgagacccaatttctttttaaggagaacatgagtgttcacacgctgacacagcctgcggcagattcactacttggagacttgctttcagcaatacagggaactgtcaagagagccattcgttttacagagagctcacttcctatggggaaagtgaggcttgtgtgctctgacattgcccattttttgttgaccacagctgtaagaagcctggcccgctgatcagtgcagccatactttcaaagcaccacctggtgtttaatggaggattcccaaatttcagcgagtaaaccctcagagggtttgctaacccaaacaccaaggaagggcaatctacacaatggcttagctctagcactcctcccctagcacagctggtgtgcttccagtttcaagagattattccagggagaaaatgactttttataatctccccagtagtcacacaccaaagcaggtcgggggagacactggtgctgtaagacaataactgggcacctctcttgagacatagaaatagtcctactaagtgctgttcaagcaagagtggccaccaagagtacatgtttgtggggttgaggggagaagacattaattaaaggatgtaatcagttgttggcaattcgaccatacaacttgctgtagccattgatgatattactaaaaatgcaatgatgttagccatcttgagctaccagccaagttccagaatacagactggtcattttcttagcaaatctcttgagaggccagccactcctgctggcagatgtttcttgcactttcaaagaaacctcattttcttgtggagtcttctcaccagaagcaagggactggatagcccagagaaacacatttggtccatagcacctggtaagagggaggttagaaaatcggaaaacaagcttcctgtatagctttcttccccagcattctccttcccagatccattcaataaagcatattgtgccttataaaggatgtgctattatgacattgcctgcagatgagcagacaatcaaacttcacttctaaggaagtgaagcaagttggctttagagaaaaggtgccccttagtttccaaccaactcatcatttgaatggccaagggaggggtcaggctttccatctcatccactgaataagtatccagcattcatgattctaaactttcaacaatttggacattcagcttcctagaagttttccttgaggaatcagctttgataccactatgtaatcccttggtaataggaacacaaacaccatttcaccatttgattcctgcaggtgcttatgggataaactatcgcaaattaataggcactaatgtgttcatatattgcttcttccaggtgagacatttttatttcagaaaggaacctttagatatatgcagtgccccaaaagaaagatctgagacttatgtgaaccatccagggagatgatttagttgctcttcagatcattttccatgcaggtgactgccaacttggcccccatgaaagaccagccctggtcaaattcaggttcataaaatgatcatacagttacttctgaaattggacaacataggacacttaggatgtcagagccaaaagctgaataatgcttctgcatggaaggcgtcaatgttctggactctccaccactaagcagggctctcatcccctcagacagccaccacacagatagaaacttggtgactggcagcctacgtccaccccctatatctccagaaagaaagaccattcattatgagagtcccatgttagtgactgtttgagacacctttccctagaagggaaacttgaaccaagtggctcatttcagctcctaactctcagtgctttttgcatgtaggatttctgagaagtgaaaaaaaaaaaaaaacctgccggttatgaagtttctgttccacactttgtaccttaaagatgagtgtgtgagacacagatcttcaggttaaaaataggcatggcccttttctatcactagccagtctccaaaattctccttaccaggcaacatccaaggaagtccattgactataatctgtgttctaggataagaggatgaaatatagaaaaacctaagatttgggttgcccctcccctcatgcctttcctggaagtgatggtgcagcccacaagttcagcagggcacatgtttccttctgtgagtggtgaccaacttcccacctgcatttgctgccactcattaatattaggttggtgcaaaagaaattgtggtttcagactgtgaattttaaatcattataactaggctcaaacacatctttattaatcaaaagaggaaccattacaatcaacacatttttgccaacaagaaataagatttttattcctattatgtaaaactccgtgcttccagattcagcaaactctcggaaagcattttctgcatcctgctggttgtgaaagcattttccctgcaaaaagtcgagatgcttgaagaagtggtagttggttggcgagaggtcgggtgaatatgggcagatgaggcaaaactttgtagcccaattcgttcaacttttgaagcattggttgtgcgacatgcagtcctgcattgttgtggaaaagaattgagccctttctgttggccaatgccagctgcaggcattgcagtttttggtgcatctcattgatttgctgagcatacttcttagatgtaatggtttcgctgggattcagaaagctgtagtgaatcatactaacagaccactaaacagtgatcatgaccttttttggtgtaagtttggctttgggaagtgctttggagcttcttctccatccaacccctgagctggtcgttgctggttgttacacaaaatccacttttcctcacacatcacaatttgattgagaaatagttcattgttgttgagtacaataagagaaggtgacacttcaaaacaatgatttttttttttttttttgctcagctcatgaggcacccacttatcaagctttttcacctttccaataagcttcaaatgcctaacaaccatagaatggttgacattgagttattcggcaaattctcttgtagttgtaagaggatcggctttgatggtggctctcaattggtcatcgtcaacttcccatggcctgccattatgctcctcatcttcttcattatgctcctcatcttctttgcaaaaccttttgaaccaccactgtgccgtacgttcgttagcaattcctgggccaaatgagctgttgatgttgcaagttgtctccactgctttatgacccaaatcgctcgaatttgctctttaacatcctttccatagtctaaaataaacataaaataaatagcaagtaatacatcattaacaaaaaaataaagtgagaaatgcccattaaaatgatgtataacataaccaaatttatttaagaatgtatttcaataccaaatggcaaattccaacaatgcaaaaaacacaattccttttgcaccaacctaacttgtgattgtgccttacttgcctctcattcccagcaccctgcatagtgacctcgcagaggcacagctcatgccagttctttcagatgaaatgggaaaactctatctgaacagttagctaaagcacttgacatccagaactccaagtccatacataacttcccgttccccatgcaatgattagtgtcttcatgctctccagtgcagtggctggtgtcttcacatgcttccatgtagtagctggaatcttcacattctcccgtgcagtggctggtgtcttcacactcttccgtgcagtagctggtatcttcacactcttctgtgcagtggctggtgtcttcctgctctcccatgcagtggcttgtgtcttcacactcttccgtgcagtggctggtgtcttcacactcttccatgcagtggctggtgtcttcacacactcctgtgcagttgctggtgtcttcacactattctgtgcagttgctggtgtcttcatactattctgtgcagtagctggtgtcttcacactattctgtgtagtagctggtgtcttcacactattccctgcagtagctggtgtcttcacactattccgtgcagtagctggtgtcttcacactctcctgtgcagttgctggtgtcttcacactattccctgcagtagctgatgtcttcacactattctgtgcagttgctggtgtcttcacactattccctgcagtagctgatgtcttcacacttttctgtgcagtggctggtgtcttcacactcttccgtgcagtagctggggtcttcacattcttccatgcagtggcaggtgtcttcgtgctctcccgtgcagtggctggtgtcttcacgccctcccatgcagtgggtagtgtcttcacactcttctggagcactctcctcttcagctgtagccgagacccagcagagctcacagaattcttcttccttatttacaaacttcctcaaatgaccacccattgacaggcaatttaacaacttattggcccatttaaactgattaaaagcagacacatatatgttttggatgtgagccctaggcctttgatgggtctttgctgaatagaattgaattattgaactgaacaaggagcaagtaggtcgaccagtgggttgtttttctacctgcaggtgactccatccaggtgcaaatagcaaggaagcccttgaatccactacaggtgaaagttttgcattgtggtcccatgtgagggaggagacaagtcacctggctattgggtagggatgaaggggataccagggctacagttagactttagcagtgaccccgcttgagcctgcaaagggcgacagctccctatggaaacaacagggatgagtggcagccccctccttggaagccttctcaaagtcactcattagatatgccagatagcctctctctcctggagtaattccttctctccagggtccatcatttgttttgtgatgttaattcatgtgagttgggagtttggttctattgtgttatgttttcctgtatgttttgatttattgaattttttttgtttattttctgtgataaaaatggatgttctatgtgaaagctgagttccttgtttctttctcttgcccgtggctgactgcgtgtgctctattgatgtcttgttcctggttcttgacactgaccatcttgtctgtgaaaggaggcactccggcgggcatgcttgatcagaagaaagggaagtttgcttggtttagtcactccacagaaacccatggtaatgttcccctgtgctctgtgtgtgtaaatgcgtgtgggtgcataccagactgaatgggaaggtgtctctcttgatggcttgtgccgcagtagttctgtgtgtgtgcatatatgtgtatgtatatatgttgtgtgtgtgtgtgtgtttgtgaagggatggcaacctgtccccctcaaagccactgccttatcattgcttcatatgtgtaaagtcagtgggtgtgacaaacaggcagagctattcctccaggagctcttcctctgggcagtgctggcctagagtaagcacactgtgaatgcacggttggaaccagcacaggcagtgccttgatttagaaggtgctgtcgttatttccagtgcccaggcctgcccctccgattttgtctgtctttccaggcctagcaccaccacctccacagcactgtactcacacataaggctctgggaacgaagtgtcacaaagtcacagaactttttctacgtggcctagcccttcaaacaaggatgtctggagggtagagagctaaaaactaaaaataaaaaataaaaaaaacctttgggctgagatggctggagatagatgggttggaagactgagagtgcttccattttatggcttccttagtgtggtttgagcaaagcccctggcaagctctgaaggtctgagctaaaaccatccctaagggctggtctcaccagcccctccagacttcagactataaagtgagtgtaatgctgtggaattcagtgcccctgtttggctactcactgccctcctgtggtgctcccagagcctagtaggctttaagaagcttgtctgcctagggtgtagagtacagaggtggtcgagactggggcgctcaagatgaacatgctacaggaggtgtgacacttgtgccctggacccagccctacttgaacacaccatatgaccatgggcatcacatcccttctctggcctcactttcctctcctgcggagtgaggaggacgagttagagccagataatttctaaagcctcacccagccctagagttctataaaatgacatctggattttttttaattcaattttattaaaaaggtcagagaggtctctcatacacaacagtcaaacatacggtaagtcgtggactttctgtttgtatcttccatgttcttgaaatgattctcttctcaccaacctggcttgtcttcatctgaaggaaaggaaaccaggaaaaatccacatctatcaacattatccatgcaaccagtaaaagtgtttcttgggctctggcagcctcgcagggacttgtcaccagaggccactccctcaactaacagcagattctgtgtctgctgagggctgatgactttctcagcatatgaggagttctattctggaggaacagcagaaccaggaccaaggatatgatggccactctaaagaataagggttacaaaactaaggaacgcattgtatcatagtaagagagtgttggaaggtggagaaaaattctttgagttaaacttttatttagaagaaaaaataataataataaaagaaatggcttctttcaagccaccaaactgggttctaagccagaaaactcccattgttctggaaattcagcccacagctgccttgggaggaggctggacaagttgaattaaacggcttatatccaagtcagcctgttgacatgggaatgtcagggtggctgaaaggggaaatcgtatccctacaggctgtcttctgaccacaattaaacataattgtgtggactgcacacttccactcctcactccttatgtctgcagggctagcttgaatcttagtgcatggctctggggatggccattcccctcaagccctctgtctcagttgtgctcctgggtgtaaccaactgccggaaagggaaggcctctgtccacccagcagctcatcaaggtagcaagcacgccctttctacaaacaggctggtccctgttcttggagatggagccccttagagatggtgggtgggatgaagtaaggaaaatgatatattttcatgaaagctcctctttctgtggcaagtggtagttgcaaatggaaagcctctacagcttcttccagtccacagagtggagaggagagattcaatggtcagttttttcaggatgtgtcctatgaggtaaaatgctcttattaccagatgtcctcccatacttccattagtttacagtgttcttggcggcaaaacctgcctggacaaccagcagatgtgtccatcaaggggatctgtgcagatcagccagccagcgtgctcagcctctctttctgccaacccgcactgggtcttgcggtgggcgtgttgcaaactactgctcttctgttcccttgtctccccaccctcaatgcctggctctgcttccctttgactcttgcagtgagcatgcccaccagtgagaccgagtccgtcaacaccgaaaacgtggctggaggtgacatcgagggagaaaactgcggggccaggctggcgtgagtaggcacggcgagcccaggggctggggctttttctggagcatgggtggaaaagctgcatctggaaatcacagtgggctggctcatcactaggaagggcagagattagagccggtggcaagaaacaaacctcaggtgggaaccaagatggggagcagagggccctggggtgagggtggccctggccgggggtgagtcttaaaatcaaggctagtcttcaattcatcacttcttcgggggtgctgactcttaggttttgagcctcttttcatcacatctgagaaatatagagggtgtgtgtgtagggggcggccccaaagtctgtttctttcactccagtccctttcgcccctcttcaaagagacagcgaggttagggccctgagtcctgctggccaccctttccattctgataaatgtgacctgggagagaagcagccaggtgagaagatgttctgggagatgactggcatgtgggtccttacctgaagctctctcatcctgccagtaagggaagcagaagtgcagtggagcctgctgttctgttgccttggggtgtcacgactgtaaactcaccctggcctctggaagaactgcaaacagaggctctgagtcagaccagtcccaggtacaatgcatttctgaattgctccacctggggggcggggcagggcggcatctcccttccctcctcgtctgtggaatgatggagagcctgggcaagcgcagccctttcacaacgctgagctgtggaagagtctaaacacagcaatgccggccttgagcgtggcctgggagcccatgttggggagggagaatgaggctgacggcagagcagctctcacagccgctgtttccagggagcgtggagcttcagtatcactcactctgacactggcaccagggagtctgcactgcagatttctcagcattgtcgggaagcaattattgtcaaaatgttgttaaaatacgatgctaattacatttttaagcagcagtgcaaacctcttcttttggaatcatacaaaacaagcacttgagtttctggaagtaggtcccaaacagcaactctagggaaaggcctataggaaggcttcaaagtctgtcagttctaggcctttctgttgtcttgccaccaagacgaggcttagagagatgatcaaaggccctgcaactctggctgttgggcaggcccaagtcgcataccaggagggactagggagctggcaccaggaagtcacttgatagtacatttcaggagagcatgaggctctgttaggaaggaaacatgatattcccccacggatggagcctggcagtctccagtggatctgtcgtttgctcagagcacatgctctgcagcctggagagctctgcagaaatggtccccgttatccccatgtttagccacattcgtactctgtgcatacagaacgctgagtcacagtgccagaattataatatgccccgaataaaatgtggtctttccccatctccctacctcccaccccgccccagacaatgatgagccaagactgccagcattcctggcgggagaagcagcatgggaactgagattgcgtgtgatggtctgaggggaagtgagtgaccgggatctttaaagctaagggttaaaagtctcatgtaatgagattaggtcacgatgaggactgctgtgtagtaaggaggcctggatgaagacggttcctgttgggggaagggaggaaggaactacggcatgttacttcatggcagcaggggcaggcgggtgcaggtaatgaagaggaaggagccgtcacagtcagggaagaggataatgaggcagaagtgaaatctgaagcaggagcccagttggagtgacctgcgggtgtcatggagaccacgagatacggaggcccgaaactcagccctgaacaagggtggacacacatgtttgaggttgttgggatgaaaactaccaatgaggtgataggacgggttgttcagagtgaagtggaaaacaagaccaagggctgaatcttgggaaatggacacacagaagaataagaccaagcaagcaaaatagacaaaggaatgttaagagaacaggcagcagcgccagcctggaagccgcgggaggaggaatttcaggacagagctgtttatccatgcattcgttcaacagtctgcccagcttggtgctaaggctaggtggtggtgacacacaacagggaggaaattgacaccatcgtgctggagctcacagtctagtgtgggagagacactatgcaaataaataggcaactataggattggggtaagtgttatgaaggaaaagtaagtgtaaagtcgggctaataacaaaggtttctaatttggactggcaggttaggaaaggcttctttgcagaattaaaattccagctgagaacagaaggatgaacatgagttattgagggactggcagacccttaaccgtttgggtctgcatcagaagagtgtgagaagtcactgaagggcattcagaacagagctgagtgggaggttgatttggttagttctgagctcctgaaggatcactgcgacgtcaggaaaagagcagggaggaatgagaagctgcaagagcctgacacaggtgagaggtaatgtggcagcagctcaggctgcagagggaaagaagggctgtgttgtgtgtgtgttctggggtgctacccctcagggttgcagggcactggtcttgggagtcggtctcagtgagggagatggggtggaaatgggccacgacagagtgctcactcaggcagtgaggccatggacagggaggaagatgggagcatgtgaagaggagtagcatgagtgtgggaagcgctggccttcattgtaataaaggcaagggcaaacttcaagacaaggaagaagtcacggagcaggaagaggtgaaacaagctgtaggggaagcaagtgcttataggaaggcattgcttctgaagaggagaagggcgacagcaaagacagtttgaggccctgaacttgctcaggaaggaggaatttctgtgcacctgaaactaattggaaaatgaaagaagaggagtcccagagtctagtgcccaccaacctccagctagccctgggatcttggccaaagcactccgctctgggcctcagcctcgtcctctgggaaaaagaagggtcagactgacatctctgcagaggctggggtggggggcggaaaccacctgcagcggtgcaagatttcatgtgaagaaagcattctacacctggagaaactgcaaaccgtaggtccatgtggtatctaagggtcccttccagttctgtaaagcctacagttctgtaaagaatacagaatcagaaacaggctctgatgaaggggtcagtgacaggagtcactccgaatgagctcagccatctcatctcccaaagcaagggtcaggggtcacaggaacttgaagggcagtatagagactgaaaccagtgagtcgtcgagaggatgctcaaaggttgctgggcagcactgatgccacggtggagactgatatcataaatgtgcagtcagccgtatttttggcagactctgaagcctgagagcactaaaaagagacagcggcgtgtcccagggtggggcttagccatgcaggcatggcagaaggcccaggcggtgtggagtctgtgtggtatcgcgggcaacattgccatgactgtagtcaagcctggtgttaaagggtgagagtgatggggaggatccagtgaggacaaatgttgggtcctctgaaagagcaggagggatcatagaaagggaggctctggccagagtcatggagcatctgagctcagcacccaggagtggaagcaattctatgccgtgcaagggcaggatgtggccctcccaataataagagctgtgggggagaggacgtcctggagttaaggatgctgagtcagacgcattgtcaatgtggatgatgactgcagtgccatctgacttatattaaaggcgaatttgggacaattcagggaaatactattttacacagcaggtagtaaacatatggcactctttcctctaagaagaggggagaggctgaaaatacaaatggctctcaagaagttcaaatatgtctcaaataatgacaaatgcaaactgagtaactaggggaaaaaaggagtttggggtttgtctctaattctgaacctgaaaagcacgaaggaaaatcatggtctcccagaaggtttgtcttggagtcctgggtggagaaagtatctggggttgcatgaacttcagttcctacccagtggatctgttctgatggtctcatgttccttaccagccttctctccctcctcgctcttcttcaagaatccgctcaacctgaggtaggaattgtgcctcattggaacaacaacagtggagacaaccaggaagccttccgagtgtgctgtgcatagagaagccagagcccccagctgttctcagagttctttggagattgtgaagatcggtagcagggaggcattggccacagtgaaccggcctagggtgtggaccagcaccatggcaccaaggcatctgggctcctgatggcaccgaggcacccgggctcctggcttgcgtcctctcactgcaggagcacctttccagcccagaaccctgggccacctcccaggaggcaaagaggtcctatcattaacgccaaggtgtgcaaagggagcagaaagaaccaaggcgttcagacgtcacagagttctcacctcagctccccatgggcatggagttttccctggcctccagacaaaagccgctgagcagtgtcctccccttcgcaaggagtggagcctgcctgacatggaacttagccatttggcggttgcttgtcaaaagtgccagcctttaaaagcggatgaggttttgatccccatgaacctaaaattctgctcacaatcccggaggatagcaacaatagcaacaaaatcagtcttcaagtgtggtgcccaggcttatccatccagacctgtaacaaagcagacaagaaggctctgtccatttcgtgctcagaatgtgcccggatgccacagaaggacctgtagtccacgactgtgcttgaagcaggacctcctttcccagcacccccagcgccaatcctgcttcccagggtcatttcccttggagacgaacactcaggattaggtttccccagaggggagcttttcagagcccacttgcacttgtgacccgcttgcactgtgagcaagacaacgcctcatggcaaagggccggtggtcgtcatcaaggggcaccccagacaggactactgaggtgtttctgaaagaaggcctgggaccaggctaggcttggagtcagagtgacaaggctgaagtccatggtcacccacttgagcttatggttaacagcaaggggagacaaccacccaaaagcagcctgggaagacactgaaggtctggggctcagcatggccccgctggagaagagagcacctaggctccccagcacccaattagcagctgggaaacatttgtttgctggttaaactgtggctgtaaataacaatgctgccctgggctcccagtccccctcccacacgctgttaacctgtgattaagccctccagccctcacaggcagtctttgcgggtgggatgaggttattagctaaccgttcggagcagtaaaggcgcttggctcagactcgcagtgccccagagatgtaattatctcatgcacgatggctttgccacctgtcacatcttctggcttaatttttttaataagaaataacgagaggggctggcgttttcttgctctgcgacacagctagctgtgtgccgcgctgggacgtcgcaggcctgcggcggttgcctcccagactcccttctcctgtttcctccccatgcctctccttgttgctccaccactgtctccatccctttcttcatctctaacttgcgttctgtccttctgcttctccatctgaacattgtcaccacctgcactatccccagcgttcatgcccttctcctagcaccaaagccaagctgacaggtgccttctaatggtctcaactgcttacattctctcactctccctgtctctctctctttggctcagccttctctcctccacacttctcttttacagtctgtccctcctgccctcttctccagcctcctgcctcccctggactcttccctacatgacctagggagcctcaggacttccttgaaggttctgcctttccatggaacctcctccctgttccatgacccttccaggcagccaccctcacacccaccctgagcttctgcccagaggtccccaggtcttcagggctgcgtgtgaccgtcagcatcctgggtttctcctcggagtctggggctggcgccttaggcctcctctgcagctcttgggtgggggctgttgtggcccctccatttctggctggctccttttgctggtcttcccttcataaccctactctagctgggctctggcagacagctgtgaggtctgtgccgacctgttcttgcctgtgatttttctgctgttggggtcctcttgtcatcaggagaggccttttctttctctgcagcttgtctcaagatacagctcttcctaacctgacctcatagaagtttctaggcagaccctgaggacctgctactctccctctgcagcaaggattgtctatacttagaagatgctagccaggccagacctcagtctccacattcaaatacataaatagggttctttctctcccaagatgttctagttcacaccatgcctccttccagcacccacacgaaattacctggggaacatcaaatttccctgggactgttgaccgtcttttaaatgcacgtgtgtgtccatcctttggtaacatttcctttttctttttcagccaccggatctccaagtcaaagttcaggtgagtgagactcacgctgctcttccttccttctgccaccagctctgtcttcagccaccctgttgggtggcccaaggtaatacctacaagttgccagtagtgtaagggctgttcttctaagggggtaactactttctgtatggccatcaagaaaaagcttatggctcagatcagacaaataatccagcggttgatatttgttgaatgatcttggactgtccatctttttggcagcacagtccctaggaagttgtcagaccaaatgtgttttcctcccttctaagatgaagtccagttaaaagaaacataaagtgagcccttgtgactgtcatgacctacttcatgtttatagaacatggtgagatgtaacctttgatgatgatggaaagcacgtaggattatgacacccgtctgtgtcactgctcttgacaatgacagaacctacaaaaggatccagggtcctcagcccccatctgcctcccagcctcacttcctgcacttccatgaaaataacctttgttccccctacaaggaacttcttgcagttatccaaatgttccctgtcctggtgcacactgaggcccctgcatggagccaatccttcacttaaatcactatgcccccatgccttcatctggagaactcacacttctgttcagaccctcagatgtgactgcttccgtgttactgctttctctgccatttcactgggcctggaaaataccttctgcaaactccagggagagttactcagctcccccttccctggtgctttgctgatgcctctgtcacagcactcagcacatgacactcggattactggctcacagtcccctgcttccaaaggctctgcctgcatgcctccaggggttatttccagagcacccagctcagtgcctgtccagtggtgaacgtccatacatgtgtgttgaatgaatgagtggacagatgtgtgcagggagaatgtgaattcactcccacaaagcttgtatgtgccaaaaaatattggttatttttcataattgagctaatcttgtttccctagccctatctcctacatggcaggagcatagagaaatttttatccagctgagtaaatgtagcccagtgctgtattttaaacagtcccttaaggtaaagtgatttgtctctcagattgcctctctcccagctcctctcttggacggagctggacacatggcggagagggactttgagatcccaggaagcagggaatgatgagggctggtcctagaagccacgcgagccctctggatgcttgctcatctctgctgcatggggctaggctgaactgctgtctgaactggtacctgctgaggtccatctggttagggcatccactgctggagtccatgcccttagggcatccactgctggagtccatgccctctacttgcctccggccttgaaatctccacctctgctctctgacccttgagttctgttggcccactgactttagcacctctatacctcagctgaggacatggacacttccaggtccctcacactccgtgaaggagctagaggagacagcagccctatgacaggctcattggcctaccggtgtcccatcacaacctctgtaacagccaggataagcttcaagccaagggctgaccttctcccagggtctgccgaggcactccaccagccccagtgttgctgggcttccccgtggccatctgggtgtttctaaagcaactccccaccaacctcttgggctgtggtgaccaagggctaaaaattaagtggggaccctggtgtctgacttttgctccacttctgataccttctttctctcccgtttcactaggactggaaaatacaggcttttttcccaatccttgtttctctcaaaccaagacctcatctacataaaacatctagggtcaggcccatccactctagctcttattacagagcaagagctccagaaatattaaaaaaaaaaaatttctctctctcagtaatgcttggctgttactgcttaatctccagcatctggagaagtggctggtacataacaagaacctaataaatatttgctgggtgagtgagtaattaataaatgaatgatcttgccccagtaagacaatagacttgacacagattcaaacaaaatatctaatttgacagtcaaagctgaaaaagcatgttgtgctttaacagttccaaagcccccacacaataagagtaaagggattaaaaatacacttgaaaatatttccaaaatatcattctcagttcatgcaagtgagtaaatcataaattaataaatgaatgaatgaatgaatgaatatgatctggaggatggaagggaaaattacatacttgtgtctcgagttagagattgcctggaacactctgggaacattattttcatccagtgatctatggtgcaaactgtgcttttcaacaagagggaaagagcagtggtgcctgtaaacctctggagtctccctcggccctgaggctttgctatgtgctggccattcagccctgatcatctgcctctgggaaggccttctccttctgcagccacccctcaatacaccgcagtaatgcggacggcagattttgttctcctaaaggcttacagctagtagattggcactatcattgaaactcatttccagatgaggatcctgaggctttgagaggcccaggtcacagggctctagtatggctgagtcagagctcatacccaggggctctgctgccaatcactgtgccatccttgtgatgaggttctgcccgggaatagtaaaccctgttcctgtatagctagtgtgtccgcagagtgtgtaactctagagccatgctattcaacagaaatatagtgcaagccacatatgtacttttaaaaatgttctagtaggcaggttaaaaaataaaaagaaacaggaaatttctttgatttaaaccagtatctctaaaacattactatttcaatatgtaattcacataaaaattattaatgacatattttgcattcatccttttgtgccaagtctttgaaattcagtgtgtgtttttcccttactgcccatctcagtctggactgaccatgtttcccatgcacggtagctgcatgttgctagcggctgccacgcaaggccacgtggccctggaggtttcacacatgagcaggtatcacacagcagccgtctaatctagattcagcagttcactgatggtgtctgcttagggaatatcaaaggttacaaatagattgaaaatgccaccaacgttttcaaagtattcctgatcattttctcaagttaggtgaaacagtttaacaattacagataatggaatttgagtctcaaactggccttttcctttgcaaaacagaatgatccaaagtcacggtttctttaaagaactgtaagaatggagtctctagggaaaatgtggccggttagtggattacagccatagtggaggattcccttggtaatccaggttttcacttagaggaattagttaaaataagagatttgtgacatttggagctcactgttcagaataaatgtaaacagttatgaaacaaatgattcaggaagtcttttgtaacctgaagggattgattacacaagttggagtttctggatctcaactttacggagttctgaagtgaacctcacggggttctgaaattgggaggactagcttgcccagtcttcagtgaaatgtgcttccaatgttctcttcacttctgccataccatcagcaacaaggcacaaatccaaatttgccccaatctctaatagtcctttgtaaagttacttatttacaagagaattaaacttaatgattttctgtggtgtttgttgttggttctggtaaaaaaaaaaaaaaaaaaaaaaagtggaaacttactctagccactagaaggagcctgcagggcccatcattttgatgttgtcgacgattccagatgcctgtgcaccattgcatgtcaagcaaactattttaggagcactgtccgctcctcacctccaccctcagccctggttcacaagagctccgggaatcttcaagccttgtcttccagagggaggtagtacatttgcgtagagttcgtctctgctgctcaaccgtgccatcagccaggggttcccgtgcaggatggactgtgctgagtcccatgggtctgtaaccaagtgtaagacacaacccgattccttcgtgggtcttgtgagctccgcggagaggcaggaaccatacaaatgaaacgtaactgacagtacaaggaaatgggaactcatttcctctggggacccttctcgcctaaggtgtcctttcgtgtgctccctggtggacccgcccagcactcaggccctgctgtgactgctcacttagtggtctgtgtctccgtgtagcttttacgcagaggaggcctgtgagcgctgtgctagctactgagtatctggtgcctagcccgtggtcagtgtttagtaactatttcttggatgtgtaactaaaatgagtaatgcagacagtaagcgctgaagagtgccaaggctgagaagactagaagcatgcatcgtggagaagctgggactcagtgtgagccccacaggaggggcaggacagacaggatgaagcaacggtggagtttccggtagctgggaggacttgccttgcagctggacaggcaagaggaaggcccagtgtagggagaagggcaggtggagctggggctgcgagagcagaagtttagaagcagtgatcccgaagtttagagacatagatgagacccattcgtatccatccctctctcctgtgtctacatatggaaggttctatttctagagaaaatgacttccagttagtgtgaagggaatatgaatagcaggcaaatttctcctccctattttatcatttaatttctgtatcctccatgcatatgtaaacataaataaatttacacattctaataaaccattacatttattatacagtaggaagtgttgccaggaaaccagttgtcaagcaaagctatattttgaagagtgggaggtgcataattatctttaaatactttctctggatagtaattaccccacccccaccccagcccaaatccatgtgactctcccaaatgggtctgctcaggagcaccccagttgaaagggacaccgtcctgtccactccggccactcctcaggggtctgtgcagagcagctccagacccatgggaccagcctgaccacacagcacccatatccactactcccaagcatgaggaaaaaggggcataatcaagctctcatattaaacccactccaagacagctctacataccgcaaagaaagcaaccttgattgccttggactctgaataacaattatcagtgatttctggaacttgagactgtatctatttaaaacatgttctttgcaaacttcactgtcagctctttaagatcagatatgagtttgtcctgaaaattcattttttaggggaataaactacttgccaaatttctgtacagtattaataatcacaatcacaggaaaaaagcagaggcatgccctgcaagataagactgtttagtatcaagatctggcaaacttcagaggtcgcctctcaagaggaccatctgggactcattgtctcatttctttgtccctctgtccaccctccaccatcctccctcggatccagggcagtatgtctgggggtgcaagaatcccaaagtgcatttagaaatcataacgttttaaattgttaatgtttatgggcactaatgggtgtatatatttatgaggtgcatgtgatgttttgatccaggtgtacaatgtgcaaaaatcaaaccagggttatcagggtgttcctcacatcaagcacttatcatttctttgtattacgaacattccaattccagtcttttagtttattttaaaatatgcaataaattatcatgactgtagtcaccatccttctctcctatgttgtatgatcaaatattacatcatatttattctatttaactatattttttcacctatttaccatctccactaccctttccagcttctggtaaccatcattctactctctgtatccatgagttcaattgctttaatttttagctcccacatatgagtgagaatatgtacaatttgtctttctgtgcctggcttatttcacttaatataatggcctccagttccatccatgttgttgcaaatgacagaatttcattcttttttatagctgaacaatattccattgtgtacatgtaccacattttcttcattcatttgctgatgggcgcttaggttgattctgtatcttggctattgtaaatagtgccgcagtgaacataggagaacataggagtgcagatatctcttcagtatacagattggaaaccatgttttccacctggtggcctgcttccctgtgtagtggattttcccccaagtggtaggccagtgtcgcatgttaaggtgtggccctcactggagatggccttcaagctagagcagaacactgcctggattaatcctttttcccctccctgctcctcaagccaaaaactaagttctccctgcagtcctgaagaaagagtacccttctttgattactcttcactctcctaacctcatcttagatttagcaaagtcttggtaacaggattttctgcagatcatagatagaaaaatgacagagtagaaaggtggatgaagtcaggctactccaagaggcaattttgggggtatgtgcagggatccgtaacagcccaggttggcatcttggagtttgctgatgtttggaggggcttctgccctggaagtagaggaccaaggctgagggcagtgcacacagcacggagctgtccctgccccctggggcacacccacatgtggtgctgctacatgcccgggggctaggaaggaataggccattcacagaccagtgagttcacacagatggggcttgctgttccaccaccagcataacttgacccaggaggtgacgctgaggcttgatggtcatctctggcaggaagattggagaaacggactcatgccatggactgtgatttagaatggaggacctcatttcagcttccttgcgctgaagtggagggccggttttcacatccagacttagtatgccacacacagacacacacacaccggaaacaaagttttatgtaaaaatatttttgcttactgcttactttaaaaagcagtttccttacgatatgatacgcactgtgatattttccactctattcctttattcagtgccaggcatgacctactcaatagatttcatgacccactaatgggctgcagtgtgaggtttgaaacctctgcccagaggcagattctgcatgcttatttagaggaatgtctgtctagacgagagagattcatagaaaggagatcattttatggaaaaatacagatattcatggactttatcaccaggattctactttgtttctcctcctgccttcattacccaggcaggagctgtatcttcaatgcctcgtgggtctgcgtacaagccctacaggtgccccaaagccatgtgcagagctaagcaccccatttttctcataactgacccctctgcctggagctctactcccgctcctctggccctcctctgtgctgccctcccaaatcgccccagctaaaaatgttggcagtcccttccatacctgtctttcttattctgcacatccgctcatctcaagggactattgattctgcctctaaaattgctgccagctctgtgtcatcttttccattaatatagctattgccttcatcatctctaacctggagaacaggaagagaattcctcatactctccctggtctagaaggtgacagaggggctgtttttgtggggtgttccaatccaacctgatcatgtcctttccccctccccaagccctcagcatggcccctgcagtctcctcctcagcacctctccagctatggttcttctctccttgcacagtgcagccatttattaaccatgtcgtctactgaattcaaccaaacagagctgtatattttctctgtatcaggaaaatgaaaacgcctccaccatagaatcttaaaatgtgtttctttaggatcatcttagccactggttctcaaccatcattacacattagaaccacctggggagccttaaaaatacccaaccccggccgggcgcggtggctcacgcctgtaatcccagcactttgggaggccgaggcgggtggatcatgaggtcaggagatcgagaccatcctggctaacaaggtgaaacccgtctctactaaaaatacaaaaaattagccgggcgcggtggcgggcgcctgtagtcccagctactcgggaggctgaggcaggagaatggcgtgaacccgggaagcggagcttgcagtgagccgagattgcgccactgcagtccgcagtccggcctgggcgacagagcgagactccgtctcagaaaaaaaaaaaaaaaaaaaaatacccaacccctagagaatcagacttaattggtttggtgttggggcttgcggaccagtggggttttggggagggttccctaggtaattctgtgtgtagccaggtttgagaatcactgacaaaggctcctaaaccaagatacggggaagagtccatggagcatggatgagctttgaggggtctgtgtgctgtgtgggctctcaagtaaaggtgtgtgtgtgggcatgtgcccatttttctgaaaggcagatctaaacattcatcagattctggaaagattctataacccagaaaaacaaagagcctgtgctccagatgaaccccttctaccatatggatgtggcacacacagtcagggccaagaggctgggcagaaaactacggatggctctgcctgctgtgatattggtcgagtactcaacctccccagccctgagttttctcctccacaaaaatcaggataatgcgtgctttgcagagttactgaaagaattggagagaaggcatgagaagtgcctgatgtggtactgggcccctcctccactgttactaataatgctcttattgcttacaacactatttctaagaatgctgtttcacaaaaattaaaaaaacttccatttattgagcatcttcaacttcaaagcagccagatgcattataaggtatttgatccatccccacaataaccccatgaggtcggccctcttcccgggagaactgaagcttggaggagttcaggggcatccccaaggcggcagggcctggttagctggatgagaagctgggctccttgccaccagattgggctgctctagcaaggccagatcagtgaggggcgagaagagccatggtgctgcatcttgggttggaggaaacctgaattcacagccaaccccacccttctctccctgtcccctttccagccgctactggcgccggtggaatcggttctgcagaaggaagtgccgcgccgcagtcaagtctaatgtcttctactggctggtgattttcctggtgttcctcaacacgctcaccattgcctctgagcactacaaccagcccaactggctcacagaagtccaaggtgagcggcggccccagctctgctctggtttcctcctggtaactcagccccaaggcccaggggagggcataaccacaggcagaaggtggaggggaaagcagccaatggtcggggctcttggcaggtgctgtgctggagacaccaagggcctggcagttccaaagccccacaataaaatgcgctaccttgttaaaaacagacacggctctcctgactgggcccacaccatcagcctgccccaaagtcactgttggacccaggtgatgaggaaaggggctgcagcttgtttgcctatctcagactcctggctgccaactccccagcatggattttaaatacctgggggccttcctacagccctgaggtggccttaaccagaacacatgaggatggaatgagcaaaaaggcagagaagagaatagggcctgagcacaaggaaccgtcttcaatgggtcgttcattctcattatccttccttgggcccctagacgagggtcccactagccaggcctcagcatcattgctgggcagtcaagaagacctggccccatcctccacagctgctttccagagtcctgggaggcagggggtctagtggcggagaagtcagactcagacagtgcggctccaactgttggctgtttggcctgcacaggctactcacctctttgaacctcctttctcatctctgaaaatgggcatgacgatggtggtaccatccccacaggcctgctatgaggaggagagattgtgtgtgctgagcctatggtgcatgggagatgctcagtaaatgtctgttatgattgtgacgagagagccctttcccattggcttggccccaacttctgttctggccgaggtggatgggagaggtgtcatgggggatcttttttccaatggagataattactgtatttcctttccctgcctccctctctgcctcctctggccctgctcggatctcatccctctcctgggcctgccagacacggcaaacaaggccctgctggccctgttcacggcagagatgctcctgaagatgtacagcctgggcctgcaggcctacttcgtgtccctcttcaaccgctttgactgcttcgtcgtgtgtggcggcatcctggagaccatcctggtggagaccaagatcatgtccccactgggcatctccgtgctcagatgcgtccggctgctgaggattttcaagatcacgaggtactgggctccccctctcactttgaagaggggactcaggaagaagttcttccagagggcaagggaggtggcaaggcctgggtgggaggggggctgttcttcctcaaagggtgtctctgaagttcacatgcaatgggggtagtttgtgttcatttagatggcacatcatttggaaattcctctggctgctaataccagagactcaactcagtaatgtaagcaagctagggacttattcagccatggaaaaaaagtccagaggcagctagctgaggtgccttcaagaagagggtcagggactcaatctcttctcctgtgcttcaccagccttggtgctgattcttctccagggtcataagatgacttctggagactgagccatcacattcaaattggaggtgggaagaagagaaaggagcaaaagggccgaccaccccggccaagtcagcttctccactcccagaagtcactcccagacacacccattaggactgctgctgtcaaaaaaaactgaaaatcataagggttggcaatgacatggagaaattggaacccttgtgcactatgggtgggagtgtaaaatggtgcagccaccgtgggaaatggtatggcagttcctaaaaacgttaatgataggattaccctctcatccatcaattccacttctgggtatatgcccaaaataattgaaagtaggatctcaaagagatatttgcacacccaagtgccttagacagatgaatgtatttttaaaatgtggtctacacatacagttcaatattattcagtcttaaaaaggaaggaaatcctgacacatgctacaaagtagatgaaacttaaggacattatgctaagtgaaataagccagtcacagaaagacaaatactgtatgattccatttatatgtggctcttagagtagtcagattcacagagacagaaagcagaatggtgggcgcccagggctggagggagggggcagtggggagttagtgtttaatgggttctggagatggaggatggtggtggtttcacaacagcgtgaatgtatttagcaccactgaattctacagtttaaaaaaaaaggttaagatggtaaattttatgttatgtgtattttaacacagtgaaacaaattggaagaaatcttccagaagtctcagcaagggcttctgttcttgagcacctgagctgttagggaggctgagaaatgcagtattctagcaggacaagttctgctgaaaatgcgttcaagatctagccactgtaaagggctgtggacactgcactgcagatggtgttcaccctctgtccacatggccacccctccatatgtcagtccggcacctacccaaagcaggccatctccctcactgtctaggccaagcagtgactctcaagacaaggacagggctgaggggcaccatgctctaggacaatgattttcacctgacttatgaccactgggagtggtggaatccatttattggatcacaaccatcattttaaaacatactgaaatataattcatatcccatatatttaccccttacaatgtgtaacttaattgtttttttatattcatggttatgcaaccatcaccatgttctagttgtagaacattttcatcaccccagaaagaaactccatacccattccacatttcccccatcttccctcccagcaaccaaattcactttatgtctctatagagttgcctattttggaccattcatgtgagtgaaatcttataatatgtgtttttgtgatggcctctttgacttagaataatgttttcaagggccatccatgttgtagcatagatcagtactttgtttccttttatggtgaataatattccattgtagggatatactacattttgtgtattcatgtatcagtgatggacatttggttgttactatcttttggctcctatgaataatgctgctatgaacattcatgttcaagtcttcctatagatgtaggcttttgtttttcttggataggtacctcggagtggaatttctagattatttggtaacaatatgtttaagattttgaggaactgtcaaactgttttccaaagagactaaagcatcttacatttccaccagcaatgtataagggttccaatttcttcacattctcacaagcatcgtttttaaagaaagaatgaaatagaataggaaaacatcagagggtctcacatgaacgtaaacattgtttcataaaaagctgagatgcagacctgacttgcagtagaatacatatttcttaatgtgcgttatgatcaaccttagaagacatatgggaaacacctggaaggaattttcaacctgtgcccctctaaggtacaagtcccctgtccttaaaaatctgctttgggggctcccaaaatctctgctttggggaatctttgataacaggagcactaaaaccatccgttggattgtgatgggtaaaaagggatggaggttggtgtcttcagttcaggatctggagctgatggcatcttgctcagagcgtgtttctgagtgtccctaggtgttgctcttctcgtcacaattctcttggcaaccacccagagcatggtcacatggtgttgtggatggtccggggaggtagacatttaaagtgtttcatttagtgcacagaaaggactcaatatgcagaagcttttattattcatctaatattatgactgctattattagaaggaagaaagagaagagagctaatagtgacctacatattcacatactcttgttcttacttatttacccactacgtatatactgtgtattgagctcagagagatggaaaaaatcgaaaaataaggcgtatggcgtgaactaaatccaggagaaatgtatagtctggttggggagatggagtttgtgcacatgaagagattaaaggaaaatctatgacagaatataatgagctggcaaagtgtggtgggcgtgggaattacctgctgtgagaaattgggagcaggagatagctcctggagaaggttgaatctcagatgagggacttaacagacacccacgattaaaatccagaagtttaatgctcctaagcaacagccttctttccctctctgaccccatcgaaagagagctcttcctaagtgtcctgaatatgttggcattacagaaagtccttggtttacagtgaaagtggtagaaatccttatatcagcaatgattaccatgcaccagtgcttactctgtgccagatagggtgagcagaggcctacgaatgttagcttgagtgatcctcccaagtacctacatgaggatgaggataggctactactattattattcccactttgcagatgagagactgaggcttagagagttgtcagttgcccaaggtcacaaaactgctcagaggtaacactgggattaaaaggcaaggcaggtctgtggtctgacttgaggtgctatactcctaaccactgccatgcactgcagagctgagagctgacctgtcttcttgtctaggtccctgagacaggacttaaaagatctttatgccctggttcttgttagataattgccgattctacttgctcctcctggggtctggtaaaactatttttaacttgcagttttcaatgcctcttaaataattctcaaaagtccctgttttgggcttttatgtatatatttctatagaaaagaaatcttgctgctatatattgttatgacatcttgaaaagatttaacattcattctatttttaatcaccaatttatttctaatctgaagatattgccaagaaaccatttttaaaaatctatcttaatcagagagcttcctgtagtccctccacaagaaggagtagtagtattttcagatctctatgaagtctataaacagaaaaaatcattgtctaattgaaagtgactgtggcaaaggccgtcatcttcctattttcaagtctccaaagcctctgggggctttcggaaagcaacaaagagactaattaggttgggggatcccataagtccgtctccagcgccagccttgggactgggtgacagtgaccaagaaaaatgcctaaaatatgggttgggagtggacattgtggtcccttcagctgaaccttgaaatgggtcatctgtgcatggtcctgccatcagacaagtgcatgccttcttcttttaaaatatcttggaaagtactttgcaatgtcttgctgctactcatatgtagaagaaatttcttctctttttttttttttttttttttacaatgtagtctgaaccagtaattgcaattcttaaacttagctgaacccatgaaggagttcattaaggagctcatctctagagattttggccagcaactcctggagagttccatgctagtggtccaatgaccgacctcacttgaagaaccactggcctaatttcctactgctgctcttggtctgctttcttctcctaaaatactgcccttcatatgcaatcggaaaacttgattattattcctcctcctcctcctcctcctcttcctcctccttctcttcttcctcctcctcctcctctcctcctccttctcctcttcctcctcttcctcctccttcttctcttcctcctcctcctgttcctcctcctcttcctcttcctgctccttctcctcttcctcctcctcctcttcctccttctcctcttcctcctcctcctcctctcctgctccttctcctcttcctccttcttcttctcttcctccttctcccctcctccttctcctctcctcctccttctcctctcctcctccttctcctctcctcctccttctcctcttcctcctcctcctctcctcctccttctcctcttcctcctcctctcttcctcctcttcctcctccttcttctcttcctccttctcctcttcctcctcctcttcctcctcctcttcctcttcctgctccttctcctcttcctcctccttcttctgttcctccttctcctctcctcctcctcctcctctcctccttctcctctcctcctcctcccctcctccttctcttcctcctcctcttcctcctcctcctccttctcttcttcttctcctctcctcctcttcttcctccttctcctcctcctcttcctcctcctcctctcctcctccttctcctcttcctcttcctcctctcctcctcctcctcctgtcctcttccttctcctccttcttctcctcctcctcctccttcttcttccttttcttcttcttcttctcttccctcttcttttttcaagacaggatctcactctgtcacctaggctggagtgtggtagcataatcatagctcactgtagcctcaaactcctgggctcaagtgatactccagcctcgtctcagcctcccaagtaactgggactataagtgccatgtctggctaatatttttattttttgtagagatggggtctcactatattgcccaggcaggtctggaactcctggacttaagagatcctctcacttggctgaccaccttgcccagccaaaaaacttgattcttacatctccactgtcttctccatactgtagtctctaattctgtcaagatggtacttttgatagtttttgactgagaaaacacatcaaggtaagaactactatgaattcagcaaagcttttaaatttaaattcctacacatctgtgtatgtttgaaaagtggtaatatgaatgcaagacaaggctgtttattcagagtagtataatgcttggtgtacacatggattcatggatccctttctagaattctagaattccaggctgctcttccctcacccaggacccatggtccaagggtcgggaacagggatctaaatcaatggttcttcaccctgaggtcatgacacagtggtacatccagagcagctggatagtgatagcaaataatttattactgagagctgaaattccaaagtttgtgaatagtttctttaaaaaataaaacaaattaatattgtccttgtaacataatagcatcactctgtcacttgcattacaaaatgcttctatgaatgggtgagatccgggtggacttacaactcatccatgatgcctgaagggagcagatgtctttgatatatcattatgaggaaaatgaattatttacatactgacattttttgtgttttgtcaaaatctgagaacaccttagggagtatgctacatgtatgaagatcattcatcctcttgttgagaacaccttagggaatgtgctacatgtatgaatatcattcatcctattgtttcaagacaaaaaaaaggccaggaagcctgtactagactgtaagaaaattactttatagaaaagattgaggaagacaagattcctgctcattgaaaacagtggggcacacgcatggccggaatctttgtcatctttgagtaaatgccccagtacggtgggccttccagcctcatgatggattgggttcttccacctgtggctcttggtgctgcccagattcaatatccagtttttctactctttgtcagcccagtctgacatattctgtggggtgggagaagggctccagacagattcaatccggacgtgataccagtttactgattgcatctcatttttgacacacttggttttcaagtgcagtgaggcccctctagcacttgctgtttcccctctcacaccttcaatccctctttatttctcctgctgctcctcccctgcagctcccttcccaggccttgaaatgggagctggggctgattcagcacagacagattggctcataaatcttggccacatatgggccccacagagctccaggtgagagccgttagcacatctcccaggctcgaaatgtctccatgtccctaccagcatctggccttgagcagcagatccagccccacaccttcccagctcttccatcaccttctagcccccactcttctcaggccccctggagcctctgagctcattgagggccattattaaggaagtctgtttggcagatgcccagttccctggcaggggtctgtggcaaaggtagctcagactccagagcctgcaatgtggctgtcaacacaatgggtggttctcctttggtatgggaatggactggtgtcacctactaggagaaagattaaaaagatgcaggtgaggatgactccctagccctgacacaactgtggttggaggggccaactaggtgacactgagtagccccgtggcccagaagctcagagaagcatgctgctaaggccatccccaggtccaggccagaccaccttgcccgcttgaccaggttacactccccatgcaggttccgttcttaatgtgaccgagacatctgctgcaaacagagaagacaagacctttgaacttgttaactaagtcagcccttgcctcaaaagtgaaaccacaaaatggtcttcccagcctgctagaatggacgggagcaggggcaggtaccagtagaaactgaaccggtagttgaggccttggggcccaggttgtcccagaccaaaatactctagaattctgcttgactcctcctggcccagcccagcatatacggttctgcctctgggcatcctaatccctcccagctctattgtgtcttaaggggctggggctcaatttgacggaagctctgctctgaggacaccccctcctgtgctcacttgctggatggattctacctgcttccccaggtggcctcagccaattctcactcctcttcactccattgcctcccatgaagccccagccacacagattcaccacaggggactgctttataactgctcttttaacaatagatcacttgccaccgaaactaagaatttttttttagccttcaggatgagaacattttgggcaggtatcaaactcagttatgaccttctctggaacacagagagaatagggtggaacatttgcagagcatccgaaagtggtgggtactgttattttgaagatctcttatttatggcaagctcaatgctctgctctatacctagaataaaggtaaaggacctggccctgagctctttgaagcaaaaggttcatgagatgaaagttccagttcaaggaaggctcgggtcactttatattatagaagaggaggaagaattccacagagccccaaacccagagacagacctagagacggggaaacaaatggagataaaaggatttctgaacagatggtggtaacttaaatcaggagaggcagagggaaaaggtaacagaagtgacatggtggtcggcaagtgagagagcttaaagggaggctgggagtaggaaggtagagggaaggagagaatttaggtggcagagaacttgatgtgatgaaaagccctcagatgtgctgtacttttaaggataaaacagggagccgagtgggtcagatgggggatggggtgagcagggacgcacagtttggagagaatgattccagcagctggagaatgggaaaggaaagttgatgccaatgatggcgacgcaggcagagtgtctggggggtgatctagagctggacaccggcacccgggtgctgtagagcccacagtactgaatgtgagcttgtgggcatgtgtgtgcactgctctgatgagagagtgcttcatttttatgcttttccatgaggcctgtgaccaaaagacatgaagtgctttgctctgctgctgctcgcttctctccaaagctcttgcctttttggtgtgtgagcgtgtgtatctcatatttttgaccaatgaggaaaaaagcttcagctgattgtgaatgtgccattaacccctctagtttaccaacagtgaatcttcctaaaaaagatggtgattctaggataggaggccatcatccaatcttcaggccatagctgtgcgagccatcagaccacattaagaggagggagtgtgaggacctgcaggaccgccagctgtttatttaagtggtttcacgtcaccctacccacctcaaaggctgccacctggacacctccaaatcccatccatatcagtgatagtgagcccccaccctcaacctgctaccagccaaggcctgccagtctccagaattcagcccatctcctctgaaccctatcagcattctttgccacatcatcatttcagcaattcctttgtctcatcttctagatgagcatataaaacatccctgataatttgcacgttaggaatggaagccttctgctcagcaagctgagcacccctcgtgatgccaggccctgggcagcagcctgccccctttatcctgctgcaaaggaaaggaaaggacaggtggcaggcctgcctcgggcccaaccccatctttctctctgttgaatgggaagcaacagtaggctgaagacaaacagcacaaacaaccatatctctgtctgtctgtctgtctgagccatgttttaactgtgttactggtccccaggacagtgtctttcccctcaggtgtttttcatgtagacagtaggctggtgccaattcatcttttaaacagaggctgacctgtgccctcaaaactgggaccagtgaatttgagaatgtgagttcttccccaaaggtgacacatgttcacagtgatctggaaatcctactcccaaggtttgctcaagccacagaaaccgttttctgtaggacatattgatacatattagtttgatgcatggtctggcaatggaacagtcaggaatctcagaaaatccctccccatggatgtagggaagctatgggaataggaaggctatgggagcaggggcaggcagccacttctcactgtttggcaaagtgtgttcaacttaagtgcacacgcacacaaacacacatgcacagaagcacccatgcacctccatggccccttgcctttccctccaggaagtaccaatgtgtcatatgaatagtaaggttcattcattcactgaacaaaatgtttgctcatcacctgctttgggccaggcactgttctaagctccaaggatataaatgtaacagatgggttccttctcccatggcctcacattctggcgagggcaagcagacaataagcaaagaagtaattattcttttttttttttttttgagacggagtctcgctctgtcgcccaggctggagtgcagtggcgcgatctcggctcactgcaagctccgcctcccgggttcacgccattctcctgcctcagcctcccgagtagctgggactacaggcgcccgctaccacacccggctaattttttgtatttttagtagagacggggtttcaccgtgttagccaggatggtctcgatctcctgacctcgtgatccgcccgcctcggcctcccaaagtgctgggattacaggcgtgagccaccgcgcccggccagaagtaattattctttgagagtaatgagggatagagcggtggccaggggagatgtgaggcctgaaggagctgaaggggtgagctccactgacgtctgccaaagaacctgcggacggacagcagcatggccttggtcaggcaggagcatgtgtaggagttggagaaagtgagggggcccgaggaaggggagtgcagctggctggtccctgaggctctgggcccagaatctacagcctctgctaggcctttgggaggactctggctttgacccagaggagaaggggaggtgactgaagcaagactgaggcttcgtgggcctcacctcatagcaacacccgctgctgctgcagcttggacatcagctgcccggagcgggggtccaggcagtgaggatgaggaggcggtgggaagtggccaaagtcaggactcattttgaagatggcgcagaaggatttgctgatgcagagtgtgagagagccaggaagatgactccgaggactttgccttgagccaaaagctatggttctcatttccttgagacggggaaggtgatgggtgggaagcaggagctccatcagagcacgaacccggtgttgtgcagcttggactttcccagacgccccaggggttgagggaggcaggggcggcagggagagtgggcagagggtgctcctccagacacagctctgtgtccctgcccacgtccttgcctttggccttcgctctaggagatccctgctagtttccatgctccatctctgccttcccaggagtgttctcccctcttagagactggatctgttcctgggccacagcctcctcctccctggagccccaagcattctgaggggctcccaggtcaggagggcccccccacctcaccatccctctctgctcctcatctggggcctcccccagactttcttgctgacggcacctggccctctccctctgcagccatgacctgcttgtcaggctcccgttggtccccatggctgtcagacatacctgggtctcaggtataatcccagttgcagttatttcccacatgcctctttacttcatgaaaacgaaggctccaaccttccatgaccattaaggcttttccagaatcttccatgacagttgagcgcacagaggatctctagaggatttgtgacttcagtgcacatgcggacactcttccctcggatacagctggaaattcttgttataaatatgcttaaagttgctggttcccaactcccagtgtattggcaggtgttggactggtcgcctgaggattaccccagccccagagtcagccccagagtcagagattagggtttcatggtgcaagggagggacctgggaatcaggatttaggaaatgctaacacacccctactggtattgttgttgttctattattaattaattaattaatattttaggacagggtctcactccgtcacccaggatgaagggcaatggtgcaaacatagctcactgcagcctcaaactcctgggctcaagtgatccttccatctcagtctccccagtaggtgggactacaggcatgcaccaccacacccagctaattttttaattttttaaagatgaggtctcacactgctgcccaagctggtctcaaactcctggcctcaagcagtcctcctgccttgacctcctaaagtgacaatcctcccaaagggggttataggcatgagccaccaccatgcccagccacctctactgatgttgatcaccgggcaggcttgggaaaactgctttagctgtaagaggggagggtgttctacccccagagaggttctcttactttttcctttaagcagatcactacagcctctagcctgcaggggctccaggcagtccatcacacatactgggttgtacagaatttatataaggacagagttgggaagctggagggggacaaaaccctgcaatcttctgccgtctaaaatttagagcctattttggtgagacaagactgtatagaacagatacaaatagatgtatattaatattctgcaacagagggggtatggctggcaggcaaaatagaagtaaggaaaagctggatttgtggaggccaaaggtgccctcgaggctgcaggttggtaaagagttcatgttgccatccaaactatgacccctctgcttctgtcccttggtgtggaaccattctctgcagagatgagcccaggctgtggctgcaatgggagtggcttgcatgtcactcactgaagcagcaaaagcaatccactgtctggattggtgatgagctgggaatctctcaagggagtgacctaggaggcaggtgggccagagggggccagagggaaatgagattgttctgttcttgctcttgctccctcagggccatgtccttttgccatggtgcacttcctggtcctgagctgaccctcacacaggtgcccaccctgcatccagcagtcattagtaggttccccctcccactttgtcatgagaaagggattttcccaggatcgctgtatttatagtggagagaggccccaggactgtaaggagtggggacctcctccccaggaatcccactgaaagcccatgtcccctcaggaccgagctcctgcccactcagaggactcgtgctttgagctgccccagtgggtgtgacaggtttgctataatctaggatttcccagactcacctgctgatcagaatcctgtaggatgcttgttagaaacaaagatatctgggccccaaactacagctaatgaatcacaatctcaagaggaaaggcccttaaagaaacaattcttaggacagcgtaaacttgggaaaccaccaagccatgaactctctcttacccgtgggtgacctaattcctgcctctgctagaaggctgctgcctataggctgagctcagactggcattcatggtgggggaaaaaaagctttctttctgtttagagaccaacagtgacaacaatgattaccaacctttatcaactatgtgccaggcactctacagggggctctttggggaaaggtggatcatgtcacgcaatcctgccatagcctaatgaagcaagggctacaacaatctccatttttttgatggggatgcagaaggcagggaagtgaaatgtcttgcccagaggcacatgcagcaggtagccggcagagctaggtcgcgggcttctgaccactgtccccctctcttccccaacagattaatcatcttgagaccttgaattaactccctccagggtggcaactcacaccaccaccaacacgcatcccccacgggcagggaaaaagagcatagagtggcagctcctctgagaacctgcagtgggcagttgtgagaatgaggcacgatggggaggacagcaaggggcagagtgctgacctccctcctgttggctctcaggtactggaactccttgagcaacctggtggcatccttgctgaactctgtgcgctccatcgcctccctgctccttctcctcttcctcttcatcatcatcttctccctcctggggatgcagctctttggaggaaagttcaactttgatgagatgcagacccggaggagcacattcgataacttcccccagtccctcctcactgtgtttcaggtatggactcttctctgctgggattcggactcggggtggttgagtggcggggtggtgggaggagtgtgggaagctgcacccttttaccgggcagccacagccatcctagatcagccctggagagcccatgcccgggagagtcttgagttttttctgtagtttccctgtccccatctgccatggaattccactagtgggtggaccattaggggaaacaatataagtggtttaaaaatgccttctcaggagaatctcttgaacccaggaggcagaggttgcagtgagccaagattgcaccactgcacactctagcctaggtgacggagcaagactccgtctcaaataaaaaaaaaaaaaatcgttcttatccatggaatcctttacttaaattctccatgaaagcccaaaacataaagaaaagcagactgctcttactgggggaggggagggtgacgaaaccctggctttcctaccatgcttgtctcttgaaaaaaatattactagcccatcaaatttgtgatttcatagatattttggcttagggcaaactcaaagtggcatctatttaagtttaaaagcagatcgattgagaggtaaaaatgaatcacatgtagatgttgtcaaagtcttgaagatgatgccccagtgacgaatgtttggggaaagctggtgtagcctgtggctgtctcagcaaacacacaactgcaaaagggtcctgacgccttacccccaggaatggctgacggtcagctcaagcatgtgtggggaaagtcagagatctttgggccaaaaagcccttttagtcacccttcaaataatattatgccaatagccaggcattttgtctaaggacagttcaatagctcagagcccctggggaggagaattgggggccaggaggagggaaagaagtgaaagggaaattttggacaattttgttgacgtagtggggcagggcagggtggttttgggtttgctgttggtctaacgctgtgtcccttattggtgggaatgtgtcattcagatcctgaccggggaggactggaattcggtgatgtatgatgggatcatggcttatggcggcccctcttttccagggatgttagtctgtatttacttcatcatcctcttcatctgtggaaactgtatcctttgctgctgccccccacccctgcggcccccagcccccagcctgcagcacagtgccaaacgggcacgcccctcaggtccgggcggtcctgctcgggctcacaccacccagcctagaaccccatggcggcggaggtgggtctgggtggaaacctgcagctttggcatgggtgaggttcaccttcctgaaccctccgggcccgcagcggcgccgcgctccgggcgggctgtcgccgtaatctgggtgagcggcgccccctggcgttgcggcgtgtgcggccactcacaccgcctgcgatagggacgcgcgggagcgggccggctgccctggggccgcggcgtctgctcagaggcgggacgctccgggagggaggatgagccgttgtccttcaagtgaccttcagctctcctcctgctttttggtcagcagccctctctctgatgctgctctccaggactttagtcacgggcagagctgcacagacttcaaacagccccaaaagctccttcctgatcccggctggggcaggtttccagggcacaagccacgggtgctgcttctcttccccagctcataaccccgagagagtcacgtccagagccaggggtaacataggaacagctctgggccaagtcccagctaaggcagtgcagaaaacacagtcatggaagcctgcagacaaggtttcctcttttcccagctggatgacctcttgcagattgaaggtcctctacctcagtgtctgtaaaatgtggcaatggaatcatagaacctactacataaagggtcgttgggagttttcatgggatcatgcatgcaaggcctctgccacattcagaagccaccctggacaaagcccctcttccccagcctgggttgctgcggcttccctgtgtgtgaaatgatatgaatgtctgggtgcctggggccgggggtcagacttcacagacttaaagcccccttccagctatgctttcgttgattctgcagttctctgacccacagtgtttctgttggtggagtggggaggagaaagggcaaagaactgtctccactgggaactcccaagccttggctggctccagatggaccctccaagggtcttcgtgggtgcaggctcacattaagagttggcagagataccaagccaccccctcagcgcccagttataataaaccgctcttaagagcgttctgcatcctgctagagacaatgctgtttataatgtcaattacagccagtcatctcagcagggaaagcaatcatgaaacccagcaattaaagtgcaaggcagggcttgctgcctccctcccgcctgctccagtgtgcaggctagcctgttctcatccctcttgatagctccaggtagctaggagggtgatggggaggaaggggaggggaggaacactgttggggtctgactccctcaaattgcttccccctcaagctctctctgctgaggagctctaccctgcacgccccacatcccccgtgcccctgtgcccaccaaaaccccaaaccaagggtcattttctttaagaatggacacaaacagatatcctactgaatgtgttcttggccattgctgtggacaacctggctgatgctgagagcctcacatctgcccaaaaggaggaggaagaggagaaggagagaaagaagctggccaggtaaccctctaagcttgcccaggcctggggctccagggctcccattgtggaatgtcttcccactggtggcagagagaggcttgactgctagcctctgttggctctccctcctaggaggactctgggtttggggcttcctaagttgggcctctctcctaattcctaagcatcactctggtagggaccatcatgaattataataatctctgcaatggtgtcatattctccacctgctgggattatcttttgagaagctgtgataggtggcaggagtgtagggtggggagagagaaaggtaaccactcagttgggaaacgcagctccagcttacagagggagtcctcctcactactttataattcatctccagtgttaggaaggcaagacggggccctatgttgtatcctatcattatctagacgggacagttccaggccacacagctgccgggcactgagcagagctcctccaggagccaatcctagatgagatccaccatccttttctgctttggcgacccaggcatctctggagctgcaagaggccaattgcgtgtcaggcagagcaggtgtagctcagccccatagcacttgtgactgagctgcacacgagaagcgtcctggagaaaggaagatggactcagacccaggggatctgtcccctctggccccaacaggccacagggcggttccctcctacactgttccctatcactccagtaaacagccatttatttttttctgctgctgactggccaggactgccagcccagagaagaaacaagagttggtggagaagccggcagtgggggaatccaaggaggagaagattgagctgaaatccatcacggctgacggagagtctccacccgccaccaaggtgaggagctgtctccttcctggagctgtgaggccggtgctggggagggagggccacagccttcccaggccagaaccctgtggagaagaggagagaaagaaagacacccagtggaaagaaagccagtggggatgaacaggagagctgggagggggaagataaggcagattggctggatcccagccatctgctgatgtcttgaaggagatatgcaaagtgacaagtacctatttttgagctaagtcactgactaaaatgcaacttcaaggctactgcaagcctcttaacttggggacgtatctaactattcttcccccttctcccctgtgactgtctagatcaacatggatgacctccagcccaatgaaaatgaggataagagcccctaccccaacccagaaactacaggtaccagtcccactgcctaacctgggattgggagattgggggcagagatctaaattctaaagccacgtgggagtggccatatattagggaccatggttccagtgtccctctgtaagtaccttccactgctgagtgtcttctatctctatatttaagcatcatcagtcagcatctgggaggcaggtttgtttctggtttcctcataatgagatcacatttgagcagtgcttttgtgtcctttccaagttggattcagtgtacatttaaatttttgttacattacatgttgtaaaatcatcattaatttatataatgtattagtatggcatatgttgcaacattatgctcacttaatattaatagtcaatcccaagtctgccttgcccctactcaggaggcagtgccgagtgcagggacagctgccaccacagatgtcccacttgttgctttaggcaatgatttcaggtctcattataaaaggcgcgcttactgactccatctttttatgcttctatctgatacctaaattggcaggcagtctgcttctcaagagctttaatgtcagagatcagaggtcctccctccaggcttcacttccctgctccctgaaatcccataccctgtgcaaggcctgggcttgccttcctctgacctaggattgcagatattatcgccagtttcaagcttgaagtcaataacatgctatcaagggactgttgattttactgacatttccttgttcctgtaggttaggctatatttgggttgttcaccaagttaggtggctgagaacctcctacatttatgagcaaagctcggtttccctttttgctttccctccgctggttctctgcttagaacactcacaggcatccttgggaaccagactccctgtggtcacaccatcctcactcccctcctcctgcaagggaataggatgtggtttcctggagcttggatagaaagaacaggaagggcgttttcatatgcccggcattaaggctttgaagttcttaaaaccccttctagggtgaaaccgttagggaatttcaacgacgtactagaattattgaacaaatgcaatgggaggatcttgccttgatcctgaagcaacaaatacactttaaaatgacgttttagagggaaatgggggaaattgaatatggactgggaactaaatgattgaaagtagttttgttaatcttgttggtataatattttgtagttctgtttttaaactgctgcagtgtttatggccagagtctaaatgtttacgagttgctttgcttttaaaatattccaacaaaaaaaaaatggggacagagaagataaatggaacaagattagcaaaatgtccaaagttgttgaagctggttatatatatgaggtttagtatgtgagactgtactcttgtgtaaatctttaaggtttaaaatgaaagacagtaataaaacaaattccttagagccctgagaagagccctcccatggggccagcctccaggatgggcctccctgcacacacaacagggcagatctagcatgagggtcttttcacacaggcacccagctgcagccaggcctgtacggcagatacacctcttgcatcttcaacaaaaatctcaaattctattaatctatactcttggcttttcttttctttgttgctctaatgaaatcaaagagaagaatgttaattttaaaaaaaaagggctaatgaggattttgtcaccaggtcggccatcctagaaatgcctctcacgtagctacccagtggctctgaggactgggggatgcttacgctttccagctgaaaagctcttcccaccctctgctgaggcctcaggattcttgagatttttgagtgtacggcccgctccccgtcatttctgttggttacatgtgtctctttactttcgtgttgagacctctggtccataccctgaggctgccctgactgccccaccacgtacaccagccaccactccggcctctgaagccagccccaagcatgcccatttgtgcactatccctggtttccaggtcctcatccaggaggtccaaagggcagcatgctcttaaagctggtggccccacacatcactctgcccccaaaggctaagttagcttgtgcttcccagctcttcctgccttcccatttcctcccttccctgcctccacagtcagctcctggatcctttagtgccaggtgcagcagaagttcccagagactcctccgaagatcacgtggcctgttgtctctgttctggtcaatctctggttccttcctgcttcttgttctcccgaaccacgaatggcaaagatcctgatctaccattgtgctcccaaccgctgccccttccaggccgctggcccctgccatgcctggttcatgcaggtaccccttagcaggcagcactggtgagtgtccctcctgctctgccttcagccagaccactagggagaaagggccggtgtcagggagcacactgccatgctctcctgctccctccctgtctctctcttgccctgtctcctaggcttgccccctgccctctccctctctcctgggctgtccagattgcacccaaagtgatgtatcagagtggccaagtgggagctggactccagagtgcactctgctggctgcagcttcaattaccctcgcatgaccgcgaatactcagaggaggggcctgtttctaattcaacaaggggccatcgaggccagccatggccctagaatccttccctctctgtttcatctgaaaagctcgccagctgctttcaacctcccagatcggtataccctaattatagagaaaaacccaactcactgaaaaggaaagcattgtgcccagatgagtggaagctaattctacttttgtttaatttattaatttatttgagtgagcatgcagatgtttgcaagagccactaaggacttaaagttaacaggtacacactaaaaaaaaaggagtgccaccagacactgagtagtcagcaccgcctgtgctgggggaggctttcattgctgcagagggttcaaggacaaggagagccatgaggtggtggagtctgggggcttcatgcagaagggtggtcttgactgagctttgagtcagggagttggagaggctgaaggagttttttcaggatcgtacaatcatcagagatgctgagagttgggaggaaccttgtagatattcatgaactactcatgaagcatttaatgtgtgccaggcactgtgctaggtaccagggacatgggggtccttgttgtgggcaaacagggaagacccccaccctcctggaactgacatatcagtggggagacaggcagcagacaaaccaaccaaaaaggtgacatcacatgatgtgaagatagtaaaatcaaggattgtgttaggggatactcaggggtcaggctgctttgactgtgtggtcagcaaaggcttctctgaggacacagcatttgactggaacctgaaggattcaaaagaactagacatggaatcggagcgaagagctctctaggtggagaccctgagtgcagagtctcttacagggatgcacttggctgtggggactccaaagagggccagtgtgcctgcagcagagagaaccaagggatagtgccctgaggcgagaggccggggcagggcaggagggcagggcagaaggcgcagggccatgcgggaggctgggtctgatccagtgccctagagggccaccagaacgtctgagcagaggaggccctgacctgatgtccgactcaccctttcagagattccctctgagcggtgtgaataaagagcagtggtgttcgagagcagaatgggggcagggaggatacttgcgcagtatccaggcagagaggatggcagcttggacaggggatggtgccggagatgcagagaagtggtcaggcttggggtacattttgcaggtaggaccagctggattcactcacagcttagatgttggagagagggaaagagaaatgtagggtgattctgaggttttctaattgagccagcgaagagaaaatccccaatgcagaaactgtatccaccacctgtgctccttgtgccccaaggcactgctccgggtgtctggcccttaccaaccaggcactcccttcagctggtagcagactcttgcgccctgctagaaactaagctccttgaggacaagaaccatggctttgtcttctcagccttgggctcaatactctgtaggcactagatcctacaaatgtctttactttatgtggccaagagcaaaatcacagaagtgaggatgagcatcagatggaggggggcaagggttgccaaggaccaagggtggggctttgagtgctaccctggttttactttggaatcctctgacctgccttctgaaatgcagcagcaactccagcgtgcagcagcacctcacttccgatgcttttttccaaacctccaagaacaaaaattagaaaagaaagatccctaatgtattctactggcatttgggagtaggaggctaggtggttcagttgccaaccccaaaatgagccttgcctgactttccctgatctgtcagcatccctcctcatccataatacctgctaagcatcacgtgctgtcaaagttgtgttcctttacaaatctgagtttgtccttcagaaatcgtttcctcttaagtactgtgcctgaggttcagctgctgtgtgtctgaatggaccagctaacttgcttctccccaggaatggagctcagcatggagcttcataaacgggggggagctcgtgcagatgtaagagcctgcaccgttttccattaggaagttcgaatggcacaaagctatagtaaatatgggtttctgtaaacacaaatgattaaaataagcataaaattacctgttatcaaattatcatgaagaagaaagtgttgggtcatttcgagcaaaactgaaaagaatacaaacacctaggcaggaatttaagatccttctcaattaaatttcacttgaaataccatgatttaggccaattctggttttacttattcgactttaagtagaagacttttcttttacataccaagggttgggtgtcacaagaactccaactcttgtcctgtagacagtttttcatcttgggcctctcttctgctgaaaaaatattaattgtcttgctggtcagctctaattaccctagggaaagaatctgattgatgtctgtatggtactggccctccaaaaaagccttgggtccctaaatgcttgaatgctttttgcttgataaagaattgctttctgtgccaggcattttttttttctttgcagtacctggctttgtttgaaccagaagagggagaacatgcagaggcacagctgtgtccatgagacgagcatcccataactatctttctccagccagactagtatccccttcaccttcatcttatacagagtccccttccttctgaccggtgtggaagttcaatcatcatcaagaaataagggcttctagtgccaggcaaagcttttctttccagggttttcagcacatagggagaagggacagacatttaaaatcagtcatcaaggtactggaggcagaggttctgctgggatccatggaaaggtcattccctggagcgtgagtactcaggaaagttggaaggaggatgctatctggattgggggtccttgtgtgctctgcagagagggagatgaagcgcagctcaaacagagagagagagagcatgaggaaggacggagcacacagtgagcttgtcagctcactagggctgccataaccagtgaccacacactgggcagcttaaacagcagaaatgcatccttttacagttctagaggctggaagtccaaaatcaaggggtctgcagggccaagcgccttctgaaaggctcttgggaagaatcctcacttgcctctcctaacttcttgtggttgccggcagtccttggcttgtagatgcatccctccaatctctgcctctgtcttcacatggccttcttccctaagtgtgtttttgtgtctctgtgcctgtcttgatgaggataacagtcattacatttagggcccatcctagcgcagaataacttcttcataaccaattacatctgcaaaggccatatttccaaataaggtcacattgcaaagttctaggtaggcatgagtttgcgggggaaactgttcaacccactgtagtgaagtgctcagaaaatagtttcgtgtgagtggacagtttgttagggaataataggtggtaaggatctgactgagaaagatgttgagcattaatttacaggcttcgagtctgtcccataggtagaggttgtaataaaagcagcaaacacttacttacagagcggctgctatgtgccaggcaccgttctgaggtatagaggtactgttattattattccaccttagatggagaaactgaggcacagagagactcaataaaatgcccacggctagaaagaaacagagccaggattctggtccaggcgattggctggagagtctgctcttcactcccatgttgttactttcccctctgagcatcttcaacacatttgagcagcccaggatgggcagtgcttcccgtcatgagcgttgtgctggcaagcacaggaataagctgtctgactttggtccacattaaatgtggccactggctgggagaacgaaggcgcttctttaattggtgtcagtgtctaaacctttgcatgaagggcctgctgtggtcagtagtattgccctgttatctcgacagcacatgaatttttttttttttttttttttagttgcagaaattgggaaagtgttggtttctaattcctggaacttccaagagtgaggttatttgcaagggattccacaagccaactcagccataccctttccccaacctgcggcctagatagatgagtaacacctggcagtgccctgtcctacctggtcaccttttttcataccttacaactaggatgaccaacgaccccagtttgcccagaactagggggtttcctgggatgtgggaattttagttttaaaaccagaacaagttggtcgccctacttacaatcccccttattgtgcactgccagatacgacttctccagcagagatgagctgcagcagcacccacagggagacagcagaatgtctgtcttggttggtaccctacattttcagagccataatcatgtctgccagtaggaaggtctctgaaagtggtaaaataagtgggagtgctggagttatttagaatggtgctgttcttcttacaggagaagaggatgaggaggagccagagatgcctgtcggccctcgcccacgaccactctctgagcttcaccttaaggaaaaggcagtgcccatgccagaagccagcgcgtttttcatcttcagctctaacaacaggtgtgcagcaatggtggggaaggtggggtcctgctctctctagtaccagcctggcagttgcctgtattttacctgaacctctggatggagactgagactctcccagctccttgcaaattgtataaacaggcactcatttagggaagagtcctggattttgaatcagaagacttgtgtttatttttctctccactttttgaaatgtttaaactctatttctattctttgggtgattacccttgataatttactaattctatttaacttaacaaaatgtgatgttaaacaatatcaagaacctcctcctgtataatagagtgaccttagactattttaactcactcatctgctccttacttacatggaattgtcgttagtattttagtccaacttttatttttaatccaacaagttagtgagtcttactgttatatagatactgtgtgtttggatatatgtacaccttaccattttatttgttcaccatttttttactcatttcagtccatcctttagctagcattttctttcttcctaaagtacattctttagaggctcctttagttccgtaatggcaaattcagtgggcctctacttacctataactgtttcacttcttgctcttgaaagatagttttgctgtgtacacgattttagacagacaatttttgtcctgcagcacaagaaaggtgttattccactgtaaagtcagctgtcattccaactatggtttctttgtgagtaacctaacgtttatttgtagctgcttttaacatattctgttgcctttgtggttgtacagatttactaccatgtgtcaaggtgtggatttctttccatttgtcttgcttagaatacattctgcttcctaagcctatgtatttagatttttattcagttattgaaaaagtacagccataatgtttaaatattgcttctttttaattctatatttcttccttctgacactccaattggacatctgttagacattttcattctgtcctccctgtttcttagagggtcttacatatctttcatctccttgtctttctgtattctgggaaatttcttcaactgtatcttccagtttcttaattctattttcaacttaatctatattactgtttaaaccaattttttatcttgaccattatatgtttttgtttcagtcagttccatttgttgcttgattttccagatccatctctaaatctagtagtttctatcaattcctcatctttgtgatttagtcctttatttcattaaatatttcaaatatagttgttttatagtctatatctaatatttccaatacctccagtctttggaatctaaatcacttatccagtgtttcttcagatttcccatcttaggggcttgtccttttgtgcatctgatgatctttgattgtgaccccaacacttcctcttcatttgtgagagtcctgaagacctaaagtaggtctggggagactttcttccagatgccccttggaggtgttggcttggcctaaaattcccaggctttcctgccccacctcaagactggcttaacctgcaatttcttgacagcactgctgttattggcttccatcttcaagcaattctgccctcctggctggctctctctccatacgtagcctcagctcagtggaggttggtgggaggggttgttggtttgaagcagatgattcttacagccatctcctaactcttataaaccagaattgtctgagagagtttggcccttcgagggtttggtgcttctgcagcaggagggcttctcagagcatttagtcaaccataatgccaggagcagaagtctgaaggcctgggttgaagccctgactctcccacactaaggctgtgtttctgggcaagcctctcctacttgggtttcagtgttcttacctgtgaaatgaagatgatgacacccatcccttccttcctacattgctgtcaagatgagatggtgtacaagacactttggcatttaggaacctagcatttttggtgctatcactgagtgcctagaagctcagttgggtaattgtgctggggcatggaagtgaattgcacatttaaagctattacacaggagcagatcacctacagagagccggtttggctggcctctcagcatacccagctccgggtagtcctattgtgccttatgcataagcatagagttgatctcataaagtgatttcttttcaatgatagggaaaataagtccccaaacaaaagccagttatgaatgtcagagcaggatttgggaattcagagattctcaaaggtctcagatgtaaccttctaaaatatcaaagatgatatgtgcaccatgggggtgagcagttgtcattaccaagcagcagtaagacttcagaatgaagaggtcacttcaggccaacaagcacctgttgccagctgctggggagagctgaggagaggggctcccaagagccgactggtgcttccccttgtctgccttgacttgtctctcctcctgtcccctctcccgtacaggtttcgcctccagtgccaccgcattgtcaatgacacgatcttcaccaacctgatcctcttcttcattctgctcagcagcatttccctggctgctgaggacccggtccagcacacctccttcaggaaccatgtatgcatcgcctgtgtcttctgcactccttccccctggggctgtgccaggcccacagcttctgttgctgacatcattgttcaatcaggagcccaattctaggtgtcataattagatccacaactaacatttcattaagagagtagggctttgatagaaaaccaccctaggaccacaagcaaataaaagagcatgtacccaaatgctcaggctggtttgataattggcaaagatcaggactttcattgcctgtggatgttccccaggaagctctagttccctgcaaacttagtaaaatgtggccactgactacatgccctcccttgctcccagcatgctctgaccagaaggggagcattggcaaataggtgccaatgatatggctgaccttacctaaaagagagtcttggtacctttggtagagtagaaccaaatgtgaggacccacccaaggctctggtgaacaatattaaaggccagtttaagaattgctctatctcaaaacctcaaaactttgtcaagtcccaaccaagtgggcatgaagacagcccgctgatctaaagccatacccatgccaaaccactctgcgctcctggggcctgcttggtccagggctgtcttaccgaggttagcaggtgttggccccatccctgatccatcacctgaaatataataagtatgcagtcctggagccggtcctcagcctgtgcagacctcacctgaaggatgcacctcccttgccccagaggacataacccaggaatagatgtccaccatcacaggaagctggccagctcagtcccaccaacgtgagcgaagcattttgaatctccctgcaaaaagacaaaccccattctctgtccttttgacaagtatcttagtggtctgatttgggtttgtaagtaaattggattaatgggaaaagcatccaaccagatgctgctcagatccagtaccagctgaggcatgccctggaagctcacctcacttatctgggggcttcaagggaagccgctgtgctgcctgaggctagccccgcctcaggatgtctgtgtgtgtgccgcttgccccccatgtccatctgtgtccctgtgcaaaggcttaagtgccaggcatctcattttgaagtgtggccccttttctggtgaacatccactgacctctcttcccgtcctgcttttctcccttccccatcccatccccaccctgttcctttttgttttgcagattctgttttattttgatattgtttttaccaccattttcaccattgaaattgctctgaaggtaaagcccccatccccttctgctcctcctgtcccccttgtgccagcaccaggtctctgccgctgtctgtcgctaacacacatgctccttcctgttggtgtggggttcactctcagagccactaatccaattatgcttatttttcagatcctaggcaatgcagactatgtcttcactagtatctttacattagaaattatccttaaggtaatgcaacctgggcaatgcatcctctgtcgctttctttgtctatctctgctctgtgtggctggatcttttgtcttttctgtttctttcactctctcttttctttactcccaagcctgaaattggaaaaatgagtgcccctcactttgtgtgatgcactttgcccagacttagaagccaggagcagcctaccccaccacagctcctccctccagccacccctaagcagtccgtggcctggaagggacacgtgttggctgtgccaacattaaggctgccatttcactggttggggctgcagccgtcagcagcgccagacatacatgcccacatgcaccagctccggttaactgatacctgagcccacgtaggactctccttccctcctcctgcttcatacactctgaaagtgggaaacctcctggggcgtgaaagaatcacttgagctactctctttggatgcccatccttagcaccttcctcagtacttgcagcagatattgggtctaagctggagttggggctgtgtcacagtgatcacaggcctactgtgagatgtggagctggtctcccagctgagggcttttagcagggccattacagactactgccgaccctcagtcacctgctgcaaagctttgtcacagtgccccttgccctgagcgtgggggagggagaattgtgctggagagctgagtacagcaggatgagagcaggtgccgcaaggaacctgagcacccagcccccagcccccagcccttgcctgctgctggcccagctcagttctgctaagggaactgctgcaacattgctaccctcagaacaggcagagcccacctcagggcaacactgggatgagagaaagagtattcctccatttttcgggtatatttctgagtctctaaaccaatgcgtggcaagccagttcatctgagagtcagggtgtgagttccatgacctcagggaacgtgtgctcctctctgagcaagggggtagattctaccctttccccaaacagaaggactaaggctctgaagcccatgcttcagctttagcttcttcctgggagactagcctgggactccccctcccaaggagtccaggctcccttgtcatcctatcgctgtggccaatgcaagctgaagtccacacctaaccgatgccactgccagctgcaggcctctccttccctgatgagactccctcatcatggcccagcctgttgatggacaggacagttcagtcacatccagatacaaattgaatggggcagtttttatgtgccttcccctgtgtccttgtccccaggacactcaggtgcccccagctgccatccctggttcctgctaaccaagtatgtggctcagatttttcttttctgctcgtggagagtagatctgaccaggccttggttcctggaggtcgggagagggaaccgaaagttgcgtggctgcactaagatgcaccgcggcaaaacctgctttccatggtgagctgctttgcttcccggacttcagatgcagggaggcacacagaccccagagttctttcccaggacaagagacgctctgaggcccaattctcagtgcccttctacagagctgcccttgtggatttcaatggtgctatttctccttcgggattgccatacaagctgaagtgaaaggtctctttgcaagcattgtcatggcaaggtccttccatcccctccctcttctactttcttctatgctcagcatgcttctgaatagaaaccccaatgccggaacactcccctgtacctccttcccactgggtccctcttcccggcctaaggcccggtgtcatgtcatggcacagatgaccgtggctgtccaagggggacatttagcacaaggaacagtggaagggcctggaaatgtttggccttaaaaaggaaaggcttgtaggctcacaacagttggcctgagtcatacaaaggaccgtcacatagaagaggaagaaggcagaatcaagaccaatgagtagaaatcacaaaaaaagacaggtttcatagctagaagagctgcctggagaggcagggatggcccgtggttgaacagagagctttcctacccttccaggcagagctagcgagccacgtcccattcctttccttcctcaggatggaaacaccccagcaagggccccttcccaagtaatggtgtagaattaggaaagcaggaccgaggtggctggcaatcagaaaaaaagggtcaaagaggaacaattagcactgggtacctgagtctggcttttcctgatgccctgaacaccacagatgactttcaagtaaatgctacgttttccccatgtccatttgccctttcttgtacagccactcttcctctggccctgcctggatgcatgttcccaccgcccccacatgcacacacatgcacttgctcaagtgttggtctcatttgagggtccctaaacaaaacaggagcccaaaaccagaggacagagttggcactctgagccttattagtccacccatctgaggaatgcagagtgttctgttagagctcagtagtagcctcagaagatccaagccaggagcaagaagggatcagacccagtgccttcctaacactaaaagcaaggtggctggggaagtactgggctttctgcaggcacaattaatatgaattatgggagcctcctgagtccagtctgtgggggtcccagctcttcaccaagaggcagggaggcaaggcttccagatggtgggccttctagaactatactcccttgcatcttttatgtaatctacccacttctaaaaaccattgcccaacacaggtgcctgagtcctttgggaccccctgctgcaagagataaatggaaagaattaggttgcaagagctatttttgcccatttccctctgtgtttgcttttgaatggctctgcggacactctgccctgggcatgctctgattccaaagagatgaactggaccccagatgaccggggagccttgctccacctctccactgtcggctccacattttccctttggccgatgcttcctgtccgctgcctgtcacagcccttatcctggataaccactggcccttacgcaagtcggcaaaatgagaaaggctgtaaaggtgatttgttgagcacctgcagtgcgcagctttacaccaggctcagagggtggtaataatggccaagtcctgtagcagtcatcgtcatcttgtgtgttctctttttaaaagtttccaaagggctttcacaaagccaggggatagtttcctcaccttttgatgagaaaacagaacttttctcatccaggaagcatccagaattcaaatccaggctgtagtgacagctcacccttttatggggctcaccgtgtgcagggtggcatcctaagtattttacatagaggtacccacttgatgcttacaaccctgtagggtagaccttatcctcatttttccaatgaggaaacagaggcactaagagaatttgagtttcttgctccaggccacaaaaataaaataccacaggtctgggattccagcccaggccgtctggcctcagagcctgtgctcttagccactgagcctcatagcccctctgatcacacaacttttgcccttaaagaactccagatgtagtctagaagcaggacagtagaattgagtttagaatatttggcatcaataataagcaccctttgaggccaggaaggggaggtatgctaattgccagggtcaccactggaacttctcaccaggcaccagggtgaccagctggcctagtttgcctaagactgaggagttttctgggatgcaggatttctgatgataaagcaaatctgggcaaaccaggatggctggtcaccctgctgggcatgccccgccccccaacccacccactcacggcagatgtctggtgctctcagctggcctaaggactcaagcatttggagaggcagtcgggatgtgtgctcccaacccgacagcatcaggaaaggaccctgcaggcccaaagccatggacttgggatgtggaacagtgcgaaattagagtgggatggtggggcccacttgaaagggctttgaatggaggactaaagagcctggcttggcctggcaggtgcaaggagccacccagcagtcctgggctgcgagagtcttgggtggttgtgtgcatggtagcagaactcttttcttggcaccatagcgccgtctttgtccttcctgttccccatggatggtgcttgggacttgcccaagggatgctgtgggaggaaggggtggtgtgaggggtctctgggctagggctagggccactcacactggtgttcctttgtccctccctgcagatgactgcttatggggctttcttgcacaagggttctttctgccggaactacttcaacatcctggacctgctggtggtcagcgtgtccctcatctcctttggcatccagtgagtgggagcccctcagcccacgatgggccatgcagctagcaaggggtgccagagaggacaaccagaccctggagggcctgcctgcagggccaccgcagtgtgatgagagtggggtggggcctccaaagctgtgcatggtggctttgggttcttggttctgtgtcctcagtggtctgatacttggggcacgttgatcaggtgagaatatgtttaattatctgggttttgccatgacaggcagggccaggctcagctattaagaaacggttgtctccaggaccttcctgcctcctccaccacggccccagtgccctaggctgaccttcagcaacccacagtctgccactgccgtgacctcccctgacctggaccctccttctccctttctctcccctctctctccagccaaagcacctcatgtatgagtgtatgtgtgaatgtgtgtatatatatgtctgtgtaagtgtggggtgtatgtgtgcacgtgtgtggatgtgtggggtgtgtgtatatgtggatgtgtgtttgtggctgtgtgtatgtgtgtgtatgtatgtgtttgtgtttgtgtctgcatatgtgtctatggacgtgaatgtatatgtgtatgtatgtgcatatgtatgtgtgagtgcatgtatgtgtgtgactgtgtatatttgtgtcttgtgtgtgtgtgtgtgtgtgtgtgtgtgtgtgtgtgtgtgagtttttcatttcactggtctggggtacagtctgggtgtgagttctaagagctttccaggtgactcccctgtacagccaagcttgcagtcctcgttcaggtgtggaggatctgattaccagtttctaccaagttctaacagctgatagtgtgaatcctacactttaactttcaaagcacttccacatacacattcttctgtggtcctcacacacacaaaacgatgggggagacggggcaagtgttatcatgattgtatagatgggaaatttggagttcaggacatcatgacacttgctcaaggtcacacctgtggtagagaaaggcctaagtcccagcgttcctgggtctctcctcccaagagtgttttcatggttggctgagatcatgcagggaccaggaccttgggagagacccttttctgtgatcatcagttatattaccccatattttctgcctgggagcctacaagtccagatttgaatcccagcatggccactcagtcactatttaaccttgaatgaggaattcctcctctttagcctgtgtttttcccatctgacctttaaatcccttccattgtgattcggtgcaaactgactccctcccagagagactgtaggagagacacagtgatagataggaatggcctttgcatctcttggaataaaagagtcatgcaccagagaaatcggatctttccaccagccccttgagcacatcatcctgaccacacaaagcatgaaatcagcgcttgctggcctgtcattcattgtttaggtcccaagacaagtatgaggctctccaaaagcttgagaggctatctcaggtagttagcccgtgagggttaggatgtgctccatagctgctcaccaaggtggtatggttaatgagccccacctgggtaggatggacagctccaaaaaccatccaggcatcttgcttagggacctgtctcctgctgtctccattgcactagggaaaagccgtagcccgagactccgagaagctctggcttggcctcagcatcccaggtgtatggaacctgtagtgccacgtaggagccaaagggactggccttctgaagggtcactgaaaaatcaactgacaaaagaaaggttaattggagacaaagcattcacatttatttaacgtgtatacacagagcctatagaatgcagacccaaagatacaggggaaactgaccatttttctgcttaggttcaaaaaagtatggacagccatgtagaaatgtgattggacaagaagcgtaggatctaacgtgaatggaccgagtggggaacccagcaaggcctgtctctaggttcttcttgtgctctctgtgaagctttccctccttctgggtcggggcaggatcccgtctgcaacaggagtctgaggatctacactcccacatggtggatctggtcattttttatggccagtttttatacagaaaaggagagggaaattttgaataatattttaggttgtgtggctggctttgaggaaacggggttctgggttctggtttctgtgacccatcttggggaagagggattctagtgtctatggctagcctgagaggagaaggggactgagacaggagggcaagagaaggtcagagaaaaacttttgcttctgagactgcttctaaggccgtcgtttcggggtgttgtttcctgagccccaacagcgaagcccatccttccttggagtcctgagtgtgctctgggtgggttttatgtttaggtgtcaggggcaatatgtgtttggagataaacactaagaaatctcctccccatgacatcacctccagccacaaggcccgagatcccaccgttagtacggcattcctttaagtgtagtaacgtcttcagcaggcctcatgagcaggtaccattcaggcagtttctcaagcacatggctgggtgatttacatagaattcttatttaacccttgcaaagaccttctgagctgattacagacccattttacagataaagaaactagagctcagaaaatttaggaaatttgtcctcagtgccttggctagcaagtgcctgcactggggtctgaattcccatggccttgctctgaatttctttctgtgacactgtgaatgcccctgtgagtagcacagtacattgctaatgacctgccatgagccaccttgcatattatttagtcacccacaggaaagccccagggttacaggcaagctccaggctctcacgggatgggagacaggagtagagagtggtcccagaatgcgaacatccccaagatgggctttatgttttctcaggtttgcctcggattcacctgtcaggacattcccttaccacattatttttgctccccccagaaacaggaggagcttactaccctgcctgtttccctctcccaggtccagtgcaatcaatgtcgtgaagatcttgcgagtcctgcgagtactcaggcccctgagggccatcaacagggccaaggggctaaaggtgagttgagggcttgggtagggagtctccagccagcccattggggagtgggagctccacagaggtgaggggtgggttggaaggagatgatggtcagaccaagtggctgccatgtggggtcccggacactggtcccactgcatgtcccggttccgtaatgaacagaatagtaacagaggcagccatcccaagtgtctgccctaagcagaatgtgccaaagggagatcccacacaaaccctgtgcccctgtggtgccaccatccctatattccttccactgtaagatgggaggttggcaggacttttgtccttgtagtcacggagagtccagtgggggcctttgcatcccattagggtccatcacttcccatgtgactttgggagcgtggctttgcccctctcagcccaattactccccgttgtggcaaacgggctgcccctgctacctcctggaaaggctcctggcatctcctgaagccacgtccctctccccgtcccttcccactgcagcatgtggttcagtgtgtgtttgtcgccatccggaccatcgggaacatcgtgattgtcaccaccctgctgcagttcatgtttgcctgcatcggggtccagctcttcaaggtaaagtctgggctccgttgtggtcctcctacctcccctcccatcagcattcctggggaagggaactggcagatatagtacaaacgagacagtgtcctgagccagacttggcttggatataacctccacctgcagcccgactcaaccttcagaccagggtagggaggcgctagaaggaggcatcgggccaccaggccagaggcccctcaccctctccacttcacctgcccttgaggtcactgcccttccttctagaaagagagagagagggactttcatcctgtggaacctctgtgtcagtcagttgcttaaagcctgcagcggtgacctattatcaacagcatcacgtccccactgcaccacccagctttcagagccctgcacctgtcaaagtcagctcctgctgcttcctgcagcacccctcgtgtcctccttggattctggtcttttttgccctcacccttttagttctgctattctcccacctagagcattcgcccccgctcccctccactgtgtaaacgcccatctaattcatccctctgagcccagctccacttctccctccctggcgagacctccccggagagtacagctcccatggacccgagctcctgtttttgcattgcagtgctacttgcagcactggcgtctgtattcgccaccgttctgtgcgtgtgagtcaggtcctgcccatctggattctgcactttttatcccactgtccctagcacagtgctgggctatggagatgctcactaattgcttttggattgactcattgattactgaacatctctgatactctgttctctgccttccagggaaagctgtacacctgttcagacagttccaagcagacagaggcggaatgcaagtgagtagaggtgggagggcagccagggccacggccggtcagccccaggaggctggaggcttgaccagaaaggagggacagctcattttctaagactgcagtggcacctgcgctctgcctgtgtgtcatctggcctcacggacacaatgtgtagcattttttgttcctgaagtttctgcccactgaagctcctcccatggctagaacggtgaagttcaagccaggcagtcccatcccacccagcattcaaggtcactggcaggccaggcgtgaaggaagatgggagatcccagagtaaactccttctcctcctctctcaggggcaactacatcacgtacaaagacggggaggttgaccaccccatcatccaaccccgcagctgggagaacagcaagtttgactttgacaatgttctggcagccatgatggccctcttcaccgtctccaccttcgaagggtggccagagtgagtatgcaaagcaaggccccacgagccctgacattcaagggccagtactgactttccagcccatccccaagttttgttaatgtcccgcactccctctggaggtcatatttacctgggtcctccccaggcagtgaggtgtatttctagaacttacagtccactgtcactgctgaaaccgactcttctttctctagaaggtgtcaagaaactcccaccaaaagtgacctttttttagccctctttccaacctcagcatgagccacgatgtcagagatctctgtcattacccttatggcatctgggagttgggtgtggggagagcttctccaggtgtgggccctgtggtcaccataggattcaagattgccactcccagcatgcccttcattgggtaaagatggctgagatgtctttgttttatttgactggatcccggtctccttagaaaaagccttgcctgtatttacagtggaaagtaggaaagggatggaagcccgggccccacttcctctgcagaggcaatgcgtttgtgcgtagagcagcccgtgggccttgcacgctgcatcacctctaccaggcagcttcccatcagatccttatatctttgtatagatacctgcttttcccccaatatgtattccagtgaaattagaatctgaaagtcagaaaattctaaatgtttctaagtcaacagcaatgcatggatcttaggtaagagtcacattattatgtggtaagatataggtgatagctggagaataaccaagtgctgtgcagggctacagaggaaggggaagagataatccctgtccatgaaaaataacaagcttcatggggcacacagcccaggctcaaatgaatggcatatgtatgtaaactgcttatgtctaaaaccaggccattggtgatgatcggagtagcatgggtcatgtgagtgtttttatctaagtggatatttgctctcggagagatttattttacattccttctaacattctctgagctcatgccagtttgcaaagctgtctcaatatttaccaatatttccagtgttttaaatcaatgtccatgactcatgttacatttaaatagctcttcacagtttcaaaacaccttcctatacattattctaactaccctgcaaggtaggaaagtcaggaattattgtctccaatttacagatgaagaatctgagtctcagagaggttaaacgctttgcccaaggtcacacagccagtaagaggccgagctgggactccagcccagagctgtctcctgcaccctgatccctgggatccctggagcagtggtgccgtccttccgcagaggggaccctgcttctccagttccctctgtgggacctgtctcctcctgcaggctgctgtaccgctccatcgactcccacacggaagacaagggccccatctacaactaccgtgtggagatctccatcttcttcatcatctacatcatcatcatcgccttcttcatgatgaacatcttcgtgggcttcgtcatcgtcacctttcaggagcagggggagcaggagtacaagaactgtgagctggacaagaaccaggtagcttcctaggaaggagcggagggaagcggggcccacggagggaatggcagcctgcggcccaccccgcagaggggctgcgacagggagaggccgtgcagatactgagatcgtctctctattcctcaaccagagtgggctgtcagtctttttgagggacctgtgcaaaagaaatgcaaattcctgcaaaccccagatctggcaaatgtactcagccaacaaatatctatgaagcttctacttaaggatactctatgataggttttgtcaaatctcatgccctatatagaagttaacaagttagagggacccaagtgggtcggcaccatgatacggaggagagaaactagaactgtgagggagtgagggcttttggggtggggaacagaacggcttcaggaaaccactcttacatggtttcttaagtaaaacccagaggcttgtgtgggaggtgggggcaggaaagaggcttaagtgggagtgagatggtgatgccaagtatcgtgacaggttctgttagccgtgaagagctggcagtgccgtggctgagtcaggaagctgtcgtggtgggaggtagatgtagtgcctcaggtctgttccctagctcggctcccactgggaggagtccgtggggaaacacatccctgtctgtgaataaggagtgcccacgggcaggagcgcagcgtggtgtgctccttgtgaccctcgccaggccagccagtcccctgtgggttttcaagtctacatctcaggcatagactcactctgctggctgctgtgtggaccctggattgaaagaagacaggaaagagaggaggccagttagaaagtggaaatgagagaggattagaccccgatctagtatccggttaatgatggtagcgatggaaagaataggaggaggtaaaagcgttaagactcaggcgttggacaccggggctgagggtttgagaagaagctggggacattccccagttcctgatctggaagcctgggcaaagtacagagaaatggactggctctttgccagagtcccaagaatctagttagcccagaatctccttccctctcagtgaactgtgtttttccatcttatggacactggcaaataagaaagattgatttagttggccaggcacagtggctcatgcctgtaatcccagcactttgggaggccaaggtgggcggatcacttgaggccaggagtttgagaccagcctggccaacatggtgaaaccccgtctctactaaaaatacaaaaaattagctgggcgttgtggcgtgtgcctgtaatcacagctacttgggaggctgaggcaggagaatcgcttgagcccaggagatggaggttgcagtgagccaagatcacaccactgcactccagcctgctggatttaggacaggaaagaaaaactgaggagagaagtacccaaggagggtctgtggcatgggaagtaatcagtgagaagcacagctgtcagtcggtcaggaagcacattcttagcgatgccgactccctgccgaggcacatgccaggcatcaccagggtgaggaaaggaggtgtatggtccctgcctaggaccttgttacggggatttgacaagaaggggctctctccttgattaagggggccatggaaaaatcaagacattttccaaataacacctcccacctgtaagtgagccggagcggccaatgatttctcagacttccggagaaccccaccccacagtgtgtggtctcatcacatcccacacttctctgccagctccccccacaccctccagttaactaaccccactctccccatcctccaccaccctcccagcgacagtgcgtggaatacgccctcaaggcccggcccctgcggaggtacatccccaagaaccagcaccagtacaaagtgtggtacgtggtcaactccacctacttcgagtacctgatgttcgtcctcatcctgctcaacaccatctgcctggccatgcaggtcagtcccaggaggagcacagccatggtgctgcagaagggagtgtgccatggggatggaaagtgtaacggagcggcaggcagctcagtgcatcgctttcctggtcaccaagggaggcatttggagaaagacgagtgttctctgtcaaggatgtgctcctctctgggccttacggaagaatccatggcaccctgggttgatcaatggagagaggggaggagatggagaagggagggttgagctgaatgcattcattgttggttgatcaatggagagaggggaggagatggagaacggagggatgagctggatgtgttcgttgttggttgatcaatggagagaggggaggagatggaggagggagggatgagctggatgcattccttgttggttgatcaatggagagaggggaggagatggagaagggagggatgagctggatgcgttcgtttttggttgatcaatggggagaggggaggagatggagaagggagggatgagctggatgcattccttgttggttgatcaatggagagaggggaggagatggagaagggagggatgagctggatgcgttcatttttggttgatcaatggagagaggggaggagatggagaacggagggatgagctggatgtgttcgttgttggttgatcaatggagaggggaggagatggaggagggagggatgagctggatgcattccttgttggttgatcaatggggagaggggaggagatggagaagggaggggaggagatggagaagggagggatgagctggatgcattcattgttggttgataagtggggagaggggaggagatggagaagggagggatgagctggacgcattcgttgtcggtaaggtgtggcgtgtggagggaggtgggttctgcatccacctgtcttcagggacagagcttgttcccaagctctcttgagtgccagagtctccataaagttgtcacggccaaccagggaaatgaacacagatgtgttcagagatggcagagcagggaagatcttggaggttctcctgagtcctcctgactgcccacggagaggtgggcggccctctgggggtttggttcaaggaaggtcttgctgaggcgagggccttcgagaaggctgggcaaaaggtggggaggaggagcgacctccctgccccgtgttcacagctcctcccctctcctgatgcagcactacggccagagctgcctgttcaaaatcgccatgaacatcctcaacatgctcttcactggcctcttcaccgtggagatgatcctgaagctcattgccttcaaacccaaggtaggcctctgagaaagacctttgattcccaggcatcaggggtggacagaacggggaggtggggtgcaggtattgaaggcagaatgaggggaagagggaaaaaggcatcggtgaaggaccatccctgctccgatggtcagtgccccaactcctacacctgcccagagctgaaccaggccaactccaggaaacactctcagctctcagtgttgaccctggctggcatgcacaagctgcagattcctcgctgagctgaacctctgagcctctcctaggagaggcaggtgatggtctttctcctatgtcccatcctctagtacataacctgttaatagaagaaactatgctcatagactggcagaccaaacctctccaggcccagccccccagatccactcaggcctctgttccaccctcctcccatttcatcagccacacagaccaacctcatataaaacattcagccagggctggatttgctcagggctcaggactgagggctccagcccatgggcactcctgttccctgcctaagaggctatggcattgctccttacatgctctggggcaggaagaacaattaccagcaaatttctctgctttgttccttgtgtaagggcaagaagattaggcctgctgctgaatgaggcagggtcagaattcctgttctttggatcatctgtgcccttcctagccagtcacccccattgtcctcagtggtggaggagcagacactggtatgagccacaccttccaccctgggcctctgtagatgggtcagaatcacgggtatccactggccgggattcaccaccaggacagctgcttctgagggaggctataagagcaactgagcagcccccaggctaccataacaccttttggagaaggatgagaaggaacgagttctaggagcatcatgcagttacagacttgagacaatctctccagcttactgagccttcccctccctcctttggtagttttcccagaggcaacacagatcaacaggaggccaagagcaagaatccctggccatatcttctattttcattcaagtttttactggtctcaagattaattgggggtgggggagggtccagctcggcctttgaatccatgttcattgaggagatatccacagccttctttgaatgaatattcactcacactttggattccatatcatgtgctacatgtatatcatcgcacgtcattctcaaaacgtccctttaaagtaggtattagcatccctctgtggagaagggggaagggaggctcaaacaattaagtgcccaggattaattgatccactgctaagaactggcagaacggagactggaatccggcacctctgacttcactgtattttccaccacactgaggttaactatcattttcccatgtcaagtgttctgcgggtattttttagcaagagggaaacaaccttggagggacttaaaagataagacaatattcctacaatgcagattcttctgtcactcaaagaatgcctggggatcccagctgattttcatagaggaagtctcctaagggacatcctttggtgatagaacggtggtttcctgccttctccagagaagcaagtacactctttttcaccttcctgtacaagtcccatttaggaggacagatcttgtcctgacctagagaggacccctgcgttgccctgacaccttccttagggtacacggtgtctgtgcccacacatggtcctattccaagccctgcagcccaggagctctgacagttcgccacccacagcagcatgaccagctgaggccaggagtgcagtcactgcctagccgagcctcagtctcggatgactcctctcagtggggaaactggcatcattttcatacagtgtcacgagacatatggtttaaatatttcaaagccttgagtcattccacagttgactcagatgtgtttctgacgatgtctgaggcagtctggagagcctgcagtggactttctgaatcatgcctcctgagcacgggagacatacagacaaccttccctgggaagtgcatgaaattgacacctgcaggagcctccgtcctccgtctaaaagacactccacctaaatcctgccaatcaaggaacaagccagtttcctaggaagtaaccattgcgagtggtctaaactgtaaagtgcctcctaatttcctctgtccctggttttctattgtgagaagatggggcaagataacagagacttttacccaagaaggaagacagccatcctgggcccatttgcatttcacattccagggtacatctatggtgtaaagagaaaggaaaatggatctttccctgtgaatttccctaaaggggctctggcaagagggggataaaggtcaccacccagttaggagcatcatggagcacagctgagtccctggattcttactgagctatgttcttcattcacaaatagactccaggtaaagcagctccaaaattttcaggcagaaaaccaaactggaaaaacttgaagctctggaagaatatccagctggatctggcccaagaaccagtggcttctaaccatgacctgaatccatgacaactttcatttcccaccattaagtaggactctgtgctgcactttttatttcactggcatggttgtttgtgtatgacccagatgagcatcagcatttgctgtgaaaggatggctaggaaccaaggatgttgaagacagtctgaagttgtcactgcttatgtttcgtctctgcaactggctggttggttggtccatcagccggtcaacttgtattcttgcttcattctttcattgttttcatggtcatggatgttcccaatttcttcatttctgtgtgttctcctcaccactccatggaaaataaatttactcaagtaagtccctgccttaaatctaaccatcccactccttaaattcatactctgttcaaaaaaaaaaaaaaaatcacacaaagaaactaggaatcaacataaaccagtttagattgagtcggtccctgacaaagcctcaggaacctgcaggcatggtttgaagagagtgaggtggatcatgccagcattgatttgaacagtgaacagtgacccagaaggatctccttccctagaagtgagaggccatgacctggagataactggatggcccctgcaccccacacgaaggtgcaggaccaggctgggcagcacgaaaagtgctggctggaatattctgaaggtaattaaataactggatagtcctatcatgaactgaagcttgtcagcaaagacaggaaaataaattttgaagatactcttatagatttgataaactgaaaaatatgcaatgcctggggaaaaagtctaacagaaatggctaagatctctacagagaaaatgataaaattgaaaggaattcaagaaaagctgataactgaagacatctatcatgttcctgaattggaaagctcaatattattaggatatcatttctcctcaaactgatccataggctcaataccattccagttaaaactcccaattgcactttgctggaggtgaggatggcaggagagggagccacacgtaaatcctttacggccaacaggatgaggctgggtggtcctgaggcttcagccccttcgggcagctctgaggtcaccaaggagggaatgcacaggagcctggcgcgggaagcagtgtctgtctcagctactccagtgtcggctgctggtttggtagtgggagtgatgatgtcacttagttgcctgaggtttgctgtcgaggatgtctcagcaagggtactgggggggaggagctgcaggaggcgatgagtgagaggctgcgctccaagcttctcctcctcagtggaatgtggtatgccaggaaggcaggggttcaccccgtggaaggctcctaactcctcccctccacacaggctccacctgggccgcagaggggtgaagcagctgagactcacctctgcccctcagctgaagccatcccactcagggagtagccagtgatcacctccccaagaggaggacgctggaagggccttgaccctggcagctctctggaatccaagtctcggtctccctttttggctttcccccagcctgagaatggtccagaggggagaatggacccagagtgaaagcactcattggcccctctgaccccctgctttcttgaataagcagctgaaacctcgggaggcctggcccctttcccacacgttcccagtctccgctctctttctgtctgggcctcctcagcccagctgctccagcttcacaaagccagatggtttctctcatccccctaccctttcttctggtgattttcagccagaagttgacgcatatatagtggagcccctcttgactgggttagacagtctctcgccctggccgagtgagtttctcccactgtcagttgccccagccctccctggccttccccagccagtggcagctgcaagcacccagccctttccctgcagactctttcccacccagtcctgagctggccctaagaaggcagcaagcgcaggtgaggtctggagttagtcgctgctgcgagcccccatagggcgtgtcccgtgagccatggggcacccagacactcttttccacagtcgattggacttctgtctagacttccccatcagcattttattgccctagtgacagaaatctaacagccgtgagcccctctgggttcttagctgaccccctctggggtgcagagccttgtccagctgctggccagacttgccgcctcatggcctccatgccacttccgaagtggaggcagcctcctcaccacggctcctctccagacttcctgccggcgcccttgccctgcacgctggtctctgctgggcccgacaggccttaccacagccatctggggctgtggctcctgtctgccaccacacacaaaggacgtggctggcattttcagaggatcagctaagaatggggcagcagttcagttgccacagtcttgtctgctttgaagcccctgttatctttcaggaaagaggaaatgaaggcagtgaagccttggccttgtctgcttctcagagagtagagaggcagaaagaggagcggtttctccggtcccccacctgttgtcctgaggaatccatcaacgaggccctgggcacttcctttatcgagagtgagggatgagtcaggactagtcggtagcctggtgaatgagatgctaccagaaccagagctgctcgggaccctggaggtcaaatgctggctctctcttggggccactcttcatagcacagctctgggcccagccttgccccggtctcactgacacatatgccagctaagctatagggagggccagggggctctggaatggtcgtcctagtggcgagcacctggagttcgtgtgccaaaaccagcccactctgcatcgtgaaggctctgagctgacagaggctgttgctggccttggactttccacactcaggggcagccgtcctcgtatccagtgtgcccatgtgggggcagggatcctgtggcttccagagcagtcttttctctgcaggctctgctgttcttaggactggtttctgctcttacaaatgattcttggccctgacatgggtggccacaggccctgcggaggggagaaatctttggggataccctgaggatgtggctcaaatggaagggtcatcaccagctgccttgttttcactgggcttgtgtcgaaaggcacagatgagggctgagttggggctgtaggttcgcatatggatgggcagagggaaagttggaatgaggaggtgggtgcatggggaagttcacttgcttccatagagaaacaacagcccagtttctcatctactctgtcagctctgtccatgtctagaaacttctgtcctttagatttagcatctggcctctttgggcaaatagctttcgtcacatgacccgaagatactgtggtccctcctccagccagcttggggttctccaggggcatccatgccctgtgcagatgcaaggggactttggaggctgagggtccggattgctcaggtgtggacctgctgttttaggtgttggagtctgtggcgccaggagtgagctgctcccaggaaagggaccagattctgacattcccctggcaggtggagaagttgggagggcaccctcagcagacaactcagcccccaagtcaaaggtcagatctgcttgtctgagcaagggaagagaaaccacctttacgaactgtgggccaggcctctttcccacccaggccagggtgtcagtctggatggtaatcagacatgttctctgcccccgggaggaggcaagtggacggcacaccaaagaacaggctcctgaaggttgccaatggtgacagaaacagccacaggagaagagagtgcatgagcctgtgtcagagcagcggctcatcagcctaaggagaggtgtggcaaaggccacgaggccccaaactgccccaccggtgccctggggcagccagggctgaggcagtgggaagaatgccagggccagaattcctctaaagacaccaatgtggccacctgaggggccaggggaaccctgcaagctaaatccatcaggcctgagctgagcctgccccggaggcaggagagactccgatgtccacagactcttccatggactgttgagagacatttcagaacgtgttcttaaaagctcagtcaaggaccaggagaaggaaggggaagtgggatggccaggaggaaaggatgcacactggagcccgttcctctttttgaaagcggagaatcttctaggaacttggtttgtttttcagtcatgttttcggcagcaatgacattgctggctgaaatgtactttctctccaacttgacctctgcctccacctgcaccgctcaccaggaatcatcctcttccaactgttttaaattagccatgcacttctgtatgatgcagtaatttttgtgaagttttaatttttacaaagcaaattttgctttatgtcttcgcttcatcatccactgaccccagatcccacccagagaggaaattctggtagattgagacccaggaagcctagatcccacctcagcatcaccttgaaccagccagggctgagcagacgggacaggaagagcttcctacaagcacttgttccttccatgtctgtttctctgtaaagtaggaagactgccttagcatactgtggtgagactgagtgaggtcatatctacagaggaatgaaggcttcagggaaagtgccattcagatgaaactcagccggatccctacgcctggggagtttgcgcccagccctctaactcagcaccaaaggaacttcacctccagcctgggtgtgccctcttgtctgtgaccattttaaatgggcccttttgcaatattggtattctgtcgtctttcatcctgagcccatgtattctatcccttcagtctgatttctgtctcacaccatgaaataactttaaggctcatcttaatgcatccttgaagttgggttgtgcaagcatcaacgacgctaccagcatctaaactatcactcccctttcctgtggctaatgcaacccattagtcggcttttcaagccttcagctcagtttttcaccattccctctctttctcggtgcctaggccttgccattcttcgtattctttatttcaagaactctttgtttgtgtgacttgcttagtgttttgctgcaggctaaagttcaccaacaacccccaaaatattttgttgagcagctcacgtgctaggcggtaggcttggtaccagggactcaatcatgaatacaagcaggtaggtaaggccacacttgcctggggcgactttggcccactcttgagacttgtagcatccccagttcaccctctcatttgtcactaggaaaactcctgtcagctggcattcatatttcaacttaaaagaagcagtcgataatcaatgcctacacctgagatcaagtaacatttagaagcactggagggaagcaaacaacatatattgtcaatgaagaaccagacatgaagctggatattttacttgccttatctcattcaatccataagacgaatattatggcctcccattttacatctgaagaaactggaggtcagaaaaaggctaagtccagagctggctttttgttgttattgtcagtttgtaacaaacaccatcctgcttagtatgcaccctaatactgctctaagcaccttaataggaatgcatttaatcattgtaaaaatcctgggattctattgcaggcttaggtgactcaaaagccactctttccacgacaaccctattaaaacaagaaatgtgaataagccatgttgttgctatgcgcttagtgagtcctcagtaaatgttagctgtcttccttctaagatccgagacagaaagaaagaaagccattctcgagtcaccaccctctggaatggaaagtgttcactccactcctgtgtcctgccaccttctctgaggccccttgccgtccttccctctcattcagccattctgtctgtggcccctgcattccctagattgctttggacctttgaattttgtttccaaatctgagttgacaagcactttcaggagaggggtagtcagctgacaggtgggctcaggaaagtgaaaccgaagcctactacacactcatctgcatgtgtttccacacacacatgcacacacatttgcaatgggaagacttacacattggggacacaaaaattgccaaattcatcaatggcgggagctgtttcatgttcatctctgtgccatgagaggcattcagtgaaagtttgatgcatgcatgcatgaatggatgaatgagaattgtgagcccggaaaagaaagtcggaatattagtgtcagaaaggattgagaccattgagcttccatcagtgcagaaatctctacacagtcctactttctgccatacaagtctccttgtttctagaggtagctctgttggaaatccttctttatactgaattaaaatgcacccctctgtaacttccacttatccgtacttccttttccatcttttctttctataagtagttcttgagcgcctcagtgatgatgttgaagcatggtaccatctttatagggctcacagagtagtgcgggagacaccaatacacaacaaacaaaggtttcagatggggtaagggctggggtggggaaactaaagagtgtgagtgaagaggcacctgtttaaaataaggaggtcaggaaggcaccatttctgctgagccctggagggtgaaaaggagccagaagaggagcatttcaggcagaaggaagagcaaagaccccgaggcaggggcaagctcagctcgctctggaaactgagagtggcgcgtgaaaaggactgtgccagagcgcacaggcccttcaggatcacggtgaggggtgtgcacttcctctgactgtccttggaaaccgcagggatgggccattcagtggggaggattatataatctgattttcattttttaaccagcatgctggctgctcattgacaaatgactggtgtggtgagatggggagcagcaaggagcctgatgctgggaaggcaggtggcagtggaagagatggagcgaggggggcagagtcatgacatcactggatggcgaattggatgtgagggtgaggaacaggaatcagagacggctccggggttcctggctttccctgagtggatggaagagtggtgtcatttgctgaaatagagaagaacaggaagaaaccagtttaaagtgagaatgtggggatatattaggttagaaaatgtcacgtaggctgtgaaaatctggaattcagacaggcgatctgggctggagatgtattttaggagtcagcgccatctattccctctgaagatagaaactccaagaatcctgtccagaagccttcaagtcctgggagaagagttggagaacatgcagaatcacaaggaaactgggagagaagagaggaaggagaaggaaaggggtctggaggccaagagccaggaaggctgaaatgaggggtggagaagaaaatatcattccccaggataagagtagggatgagttaagccagctgcggagaagaaagaaacggtcctccaggccttctagaaactgaggacaggcagagggaggccagaatgctgccctgctgtccagagggtgacatgaaaagggccggacagaggccagtgtgtgcaggcccttcaggaccacagtgaggagtgtggacttcctctgactgtccttggaaaccacagggatgggtcattcagtgggggaactgcataatctgatctggggtcttcagtgtgcacctttaccctcacccacgtcctcccatactgagcatcacagaggtccctgactctgcccctccttctcccatactagaaatccttgccctggaggagctcaaaagccaggccttcccagaccttgctggacatgtttgcgacagaaccagggccctttccttttcccagctgtgcagaattgaatttgcagtcctcatgattccataaaaggagtttccaagacagaccttctgcacttctctttggctaagaggttctttgctataaaaaacacaggataatgggggagtgtaccccgcccccagcccaatgctgaagctagggacaggcgttctcatacagctctcttctttccttcacaatctttcctctctcctcgctctgcccaccacccaccacctcacctgtgttccgcccctacaatggtcagggcagcctgaggctcataagtctggccggctcagttttccatctcctggtggccttctgtggggcctcaggacagatcttcagggccagtggctgttctcagcctcgtggggataaccctgaccacagcaagaaatgccctgctcttggagtcacttttgaggaagacgttttcatctctatgtagtctttcgatgtacagggaaatgccttaaaatcttttgcaggagcccaggccttcgtcgttcactgctctgtgttcagccctgctctttgggaaggtattcaagaacagtctaagatgttgcctgaagaaaaaaaagtggcagtctagtgggacaagggtttaggatttgggatgaaaggaaagtggctgtgattgggtcacgttcaaacatcgagactgttggttcctgcctggcattctccctcccatccctcccctgccgtagcctctctgggtccctgcagaagcttcgctgttcctcgtggttctgcttggtcctgagtgcccccacgagcctctccatggttccccattgtccacagaggaagctgctctggccggccccgtcctccagcccttgtctccttttcagagccacccatgctctcaccttttccgtgtaataaataataaacacctctagtgctgcatccttcaagctgcctcccgagatcagcctggctagaagtggtctccaccacctctgagcttccagagcacccttttccctcttttctggtacttaatcagagctcttgatggaaatgtctcatccttccagcaggactggaaagtctttgagcaggactgtctcttggtggcatccacactgacctccttccaaatgctagcccaggaatgccgtgtgcctgtcatctctgtcagtgtcagctgaatgaaggccaacggaagacaagacaggcagcttcctctggggtgcccctcctcgcaaaagtgactccagcccctggctcacaagctccggcatccagcaaggacacccccttcagttctccacccaccacaggagcttgtcactctctggggtggtctgccggaagagaaagcagagatggaaggcaaagacagtggctccggagccgccatccgtgccgtgctcagcaggacttagcagcatggccacccaggtcagggaaattctggctcaagtgtgctcagacagttcagtgcagaactcagggccagtgagaggtgctgggccctgagactacctcaggccaaagttctgaaattcaaccctcccaggctcattggaggatggggtccttgtttgggggtttgttttgtgtcattggttttttgtaacgccgatgaacacttccacagacctagtgttctacagaacacagttctggaaatctgtagggcgtcaccatgattcggggaggtaaaactgacatttagtgtttagcgggtgggactgaggatgctgaaagtcccacaacgtgtgagagggttctgcccagtgaaggagcatccttgggccctgtggaatgtttgggaaatacttatccaaggagcacccttcatgggtgatgttcagtgacactgatagtgggggagtcttcagtggctggccaggggccgaggctcagcaaggataacactgccactagaaatatgaccgtatcttggattgtatgactgcatttcctcactaacctggaatattcacattgaagaacttgaagagcaagcaagaattttatttcaaaaatcgtacggaaacctagacattctcttgggctaggtcttcaatcctttctggacccagtgctcttctttttggaatagtctccgcacccactgtatactccatgtccctacagagctccacagcgccccgtggtggccagtgtcaccccctctctaagaacccacacatagcctcaggctggctgactcagcgtcttagtgacttttagatgaaacctgtttatccaatctattgagaaactgcagtgtctgccaccgtccacagaaatccctaggtagagaaatgcattaaaaggagtagaaaagggaccgggaaagaagggcagcagctgcggatgaaatgcggcaactcttgccccagccttcgccatcggcacagaattcagaggccaaagctgtgtgggccaagctcccgcattcccctgattattatttatttgcagagtgcccacggggcaccgggtgccacgcagtgctccttagacaggcaggccccagctttgccaggaggaccttcccccgctccccccgccccccatggctctgcactcagggatttgcattttgttacaacactgtgacaggtttctttccggccttgtgctggagagcttaaaagtcactatgaagcataaaaaataattatatgacttgcataaagccttcatgtgggaaggctagtattagctattacatttaattatttaatgtagaaaattattcacacggtgtaaaaaagcccggtgggaaagtacactgtggtttccgtctctggccctgccacagggaaggaaactggaacacaccggtctggtaggaagaagagggattcccagacctacagggtgcgtcggcgataacccgacccaccaaagcccgaggtgctgccagtgcttccggccctgcgctgggtcagcctgccttaggggcaggaaggaccttctgtgacacaggctgcgggcagtacaggaaggtagcctctcagcaagaaccccaccaacaacagcaatagtagcaactgtagcaatcagtgagcacgttctcggtgccagacagggcaggtgtgaacttatatcattctcacaaagccctataaggggccaggcacagtggctcacacctgtaatcccagcactttaggaggccgaggccaaagggccgtttgagcccaggagttcaagaccaccctgggcaagaccccatctctaaaaaaaaaaaaaaaaaattctatttttaaattagacagatatagtggcacacacctgtagtcccagctccttgggaggctgagacgagaggatctcttgtgcccaggagatggaggctgcaatgaaatattattgcaacactgcactccagcctggatgacagagttaaaccctgtctctaaaaataaaataaaataaaaaccctacaagggcaagtactctggttattcccatgttgcaggtagggaagctgaggcacagagaagttaggtaacctgcctgcacaacccgaggctcattgtgggaagtgaaggcggtctatcattttattcacatcttgttcaagagtgtgggtgcaggttgccggccagatgccctggccatgcctggagctgggcatggctccctcccccacagccacctctgcccagcgccctgcctggcgtacctgtgctctctccaggagcactcgcccactaggttagagagggcacaaggcaggagtgacaggatgggctgtgggagctttctgagagtgctgagcaggaagggacctctctgtttggggtttggaaagctctctccatggccttggtcctgtggattggactggaaggggttctaggcaggcaggcggttttgaaggctgccacagattcaagccctcccatagcaaaggagagattgctcctccttgttccagccacatctgatgctgcttgtttcctgccttcccttcttcagagtgcatggtgctgttcatttgagcttaaagttgcctgtgtgcatggccatgtgtctgcctagccttatccctctccaaggaggcattgattcagcaccctagtcctggaggcacctttgcagaaaacggctcatttattccagcatgagtagtgtgaagcagctattgggatcccccaatctacccaggtacaaactgaggcagaaaaagagcctcctgagacccccaaatggagcttaacccataaccccaaattttcatctgctctcagtggggaagatggcaggcttcaggagggctgattcatattcgtatgcccaagccttgcatagttacaggcctctagtaagtgcttattatgtgttgatgagataaataaatgaatgagtaaataaatggacgaaggccttcaaaaatgtcctggggaggataagccttaattccaaagaaaaatgggagcagaaagtgtccagttaaaagtgtgcattctaaggagtgtgtgttcctcctgcaactaggagagcagcccccctcgcctccacccgcctggggtcctctcacgaggcaagcacccagccccctgcccactcctgccctttgtccaagcagtcctcaagctagctgtgcagcgtgtgtcttggggtgcttctgaattaacacatcacaggatgggagctgacagaggagggcagaaatccccacctcctcccaggctgctggcagctgtgtgctccagttatgccttctccattaggtgccactaatttccatgattactgttatgtctaaatggcatcctggtgtaatacaatttatattatctctgcttggtgtcggttaccattgttttcatgatattcaatgggatcaactctgcatagacacacagacacgcactgagacttcaccaccaccgccgccagctgccagtgggacccagctcctctccccggttcattcggctctcatcatttctgggacccagaaaagatcagtgtttccaggagctgggcacagctccctcccccacagccacctctgcccagcgccctgcctggcgcacctgtgctctctccagtgcttgctcactcaagcaggacctctgctctcttgcagggacccccttccctaggtccggtgaagccatctgttgcccctccctccctcagcgccaccccaccgtggcagcctccagctgcttcctgactgatgttcctacccctgtctccaagggcccttcagaggacccgttgtccttttccactctctgtctcaatctcagcagccccacttctaatccagccccgaagtcctgcagcccctccagccagcacgctccgtgacccatgtgtcctaggaggggaaaccacgtgttcagagtcagcttccccacagggccggggaactcaggagctggctgcctcccctgtgtttcttggggcagataaggaaggcaggcaggaaggaacagagaagagaaagaaatgagtcatggcagtgacagcacctctgccctccaaatgcctaagactgacagcaccaccccaggcaaggagtgaaaggtgtgcggacttcgtcgtggacgccttcttgccaccagcctgactgaaagctggtgcggcctctgctctgggcagagaaggagcgaaggactcggaattgaagggcaaaggcatgcacccgtcaccccttccacagcagtcccctcgcagctctcctgtaacagacagaaaatgggcccctgccaccacccctctcgataaaagaagagtggcttctaagaacctagcagttaactgtctacatgaactcgagtcttacaaaatgcagccgtgacaacctgcaccctgtcgccaatcccaaacagcgtcagccagatttcattcaggagagtttgaatactagtgacctggaggatgggcagaaaagacctgagagacagactaaaggagaactcaagattccagaaccttcagcttcctccttcctcctttcacacacctaggctttgtttccctgctgttcagtcccacacccaaaatagaacctgtgactcctacgtcactaggcagagcaacgctggtaaataatgacagtggctgaccgggcgcagtggctcacacctgtaatcctaacactttgcagggcggagacaggaggatcacttgagaccaggagttccagaccagcctgggcaacatagcaagacctcatctctacaaaaaaaaattaaacaattagaggggcgtagtacttgggaggctgaggagcttgagaccacagtgagctatgatcacaccactgcactccagctggggcaacagagagagaccctgtctttaaagtgaacattttttttaaaggtagaaattcagagattttggtcatcatcctctgtctggaacattcacacatccagaacacctattcctgaggaggccggatagagtcggtataaagaataggcatctcttggatttttttaaaatacttccctaggtattggtcctcacattaaccctatgcaagacataggactggtgcttgtatggataataatcagattatgattacctcccctcagaaagctcaatctccagccgactagaataaagacaacggtgatgacgagattcttgaaattgcacttgaaggtgtaatgaggtggaagcctctggactctggttgctttttgttttaagcgattgcacacagagggcttgggaagtgttcctccagttggcaggaggcccatgatttcttacataggtagtcatcccatcccttttcccactgggagatgggcatgtcttgtctccaaaaagcagaggacccgggaggtaggcattttacagccaggaagtaccactggaccatggccccacagttaagacacagtatctgggaccagaagaaagcaataaaagatcaggacacatgtgccttgtggatgggagcagaagaaatggcaagttctgagtgctttggatgcatggtctcctttcaccctcacctcaactctgtgctttatcccatgttctaggtgtggaaacagtggtatagggaagttaagttatttgttcaaggctacccagctagtcagtggcagaggtagtgtctgaatccagatctgcctccagagatcaagcttttcaccagtatgctgcctctttcaacttggtatatctccaacgatggagccaaatcagggcatggacaaccaaaatggaagaaaatccacaattctcgtgcatgtgaaatgcatcctatgatgcttttgcagcagttgttccttcccagcaatgattttctgatgtcaataacaatttggtgaccattttctcagcccacccctatcagtgagtggaggtgctctggcactcaggcctaggtactgggacctgccctgagatggccagaggagaggcccatcttatgaacacatctccagagtggggagttggaagggggaaatccactcagcctgtgggattgggggatggcgagggcaaggcttccagctgcaaaaacgctttcccttctgggcagcccgccctgcgtggctctgaggagctggacagtagaggtttggtttgccacttcaaggagagccaggaaaaccctttctccaaccccttacttctcaaccatttgggacacagtcaccagagaaataaggggcaacaggtataaccagactccaggtcagactgatttcgtaagacgtgtatgatttttttcccaccctcccttctccattacacccttaaaacccctattactaatggtttccagcaaccgagggggcgggcaaaaacagagagaagagagatgagacagcatcaagcccttccactcccgagagtgttgggaaaagtattcctcctaggacccaaccacctggggacttggggaccagcaggaaggacctgggccttgtttctgggcagggtgtggtccaagtgggaggaaggggctgttgaaatagtgggaggaggggacaaaggggcaatggggatggaggcctgaaagctggccctgaaattgtcttcatggtccagctggaggactgaggggctctgggcaccaaaggcaggacggtgggaggatgggtcagggtgaagagctgcctcttaaagggaccctgtttgtgcccagacatgtaccctcacccactgcattccagctctgtggaaatcccccagggctggggcacaggagctctcagcgacaaggaacctggttggtttctgcagctcccaggtagtgtgccaccaaacagatgtcagtctaaagcctggagtagcacagcctgctgaggacaagtgtgaggcacaaggccttaactccaacagagcccagccagtgccaatccagtgagagccagcgtggagccatgggaggagggggctcccatggtcaagaaagagggggctgtgccttctgtctgcacatatacaaagaaatctgggagaaagggtgaccaggggtgcacagccaggcggttaacagggttcctttaggtctcagcccttcaccctggtgtgcccgctgattaactgtgtgtgtttctctggttttcaacaccaaacctttgctctgttctgtccatttcttccttttcctttctccatcttagaggtgttgcagaccaaggccaacttacccattttgtttcaggtctctctggtggatgaagattccaactcatcctcctttcttgagcactgacactcacaccttcctctctctcctcctcctcccacaccgaaataatgttttcttgcacgctttctaggctgatgcagagaattcctggattctgctcttgttcttgtttgtctcccttctcttccttgacttccctgcccttcccttctgaaatagctctaccccacaaagacagtattcatatcgagagggtcacccagtgttttccaaaatctaattttaagtcttatgcatagctgtagttcatctggggtcttcacttcttatttccctctccccaaaatcactattctccttttgccctgtgaatgatatctgagaacctgagagcgaattggttatttcctgctcatagcatgtgacttaaatgggagaaagaagtctctctgcctcataggctccactatattcagaaaaataccctgggaagccaacaagaaagccctgatttgaagctgaccctcacctcacccacgccctggtcagctaatctctgcttcacccatcctggctgtccagtctccggggtggcgtttctgttttctttcggcagaaatgcctgggaaccgaaaggcccctttccctgtgacctgacctcccacgctaagaataacagccccaggacagcatgtctttcggtccctctggaaagagggcatggctgggaagtgggaagttaagggagctggatagagctgggaggaaagggaagaacacagattcttggctttgtgagtaaaaaatgaagaggaaaagttggcagccttcaagtgagctggggagagatctggggaacctctcggaggacgcttcatgctttcataccccactccgacctcagaattccacctcctggaagcccagagggcaggcaaatactggtcccactgaaaaaatgtggccagccctgtcttgtccccttcgcagaccatttctaaactaaaggcgtgaatgttttttcttaaagaagacaaatctctgtagtactcggtccttccccctccacccatggggaatatgaccgcctgtagctgggggtgtatggggactatgaccgcctgtagctgggggtgtatggggaatatgatcgcctgtagctgggggtgtatgcacccattcagtcacagaacatcgctgtgcaggcccctacacctcctacacccaagaaatccatctgctaaagagtccactcatccaggacacctggggtcctatagggcctctgggacagcccattccttggttgacctgttgtccaagtacatgaaaaaagtcttttaagaacattcgtcccttctcttctccaaacatggtgaaaaataaacaaaatccatagctacagaatcaagtggtaaagtcaggatactggtcttccccttctgtgccagaatctctccttcagggcaccactgtcttcatccccttctaggcagccagcctcccccaacctaccagcctatccctagcaaacccatcctcaggaaacgctttgatcaccgcgtgccctctgcgcggcgtctgcattcagcaggaccctacctccaaatgaccatgaaagaacctggggaggggcttagaaagcctcagaaagccctgtcaagagccacataacacactcccggagtaggagcccagccttgcctctgtctcctttcccttaggaaagtctttgccagggttggaactgcccctggaaacactggggcacccagtgcaggaactagggtaccctgatttgatctgcaagagttgcacttattatggatcttgttttaacaatttggtccttcttttatttttgagctttatatgagtcaccagtgagcccagataacctgccaccctgcggcccacattgatggctgtggttttcaaagcctttttcattcccagcttcacccataggaccgagcccgctaccctctgaggggtcacacacctgtgttccctccctccagacaggcccttctgctggaagaggactgggggtgcaggagatgctcagcgtggactgagaagagagcatagtagccacatcctgccgcctggcgatttgcaccacccacgccccccacacccactcctgcccctggtgggacgtggacagggcctctgtggagaaggggtagggtgggtggatctgtaggatgggggccacgtgaccgagggaatgcgggcagtagggttagagtgtcgcctccctgctgctccttccttgctggtgctcctgggctcctggccatggtgagggcgtccggaactccagaggcaacacggaggtgcctggacgatgattctgatggtggtgttgctctgttcttgtctgtctaatattcctttttaatccccatcctgcctgccctcccttatgtagggttactttagtgatccctggaatgtttttgacttcctcatcgtaattggcagcataattgacgtcattctcagtgagactaatgtgagtattactctgccctccccaggaaacctcctcattcctcctcctctgcctcgtctatttctctctctctcactctctctgtttaccttcttttatgttttttttaatttcctgtttttacccgcctccagtcatgccttttattgaacctgccgtcgtcctgtgggggaaaaaaagtgggagcttctcctcctttttttccatttacctcagctctgcccggcgctgccgggctggggcgtggagctgagcagagggagtggcggtgcaggggacacaccgcccggctccccggggcggccacagccccacgccacctttgaactaacccagcttttgtcaggcctctgcaccctgcgaaaaccaggttatccaggtttgagctgccagaactgtagagtggtaagagagtgtttaatatgcccacgtaacctctttcttttctcattttttttctcttctctccctttttccatacctttttttttttttttttcatttttcctcttcccttttgttttgttttgtcctttcttgttggttcttcttctctctctccccggctgctctgccccatgcagcactatttctgtgatgcatggaatacatttgacgccttgattgttgtgggtagcattgttgatatagcaatcaccgaggtaaacgtaagtacatggcgtctgtccctaaccgtccgtgcctgctctaacactcatttgccttttcccggtttgtttccttcattttattttctctccccaccttcttattttttttttttaatttgtttgtttgaattggtttgaaggtttttttttccttgttgctttattttgaaatctttttttttttttaactttggaacgcattaggccttccccttttctgttaagttctgattgctgcatcttttctctctcccatacaatcagcctggcatgactcacactgtatcggaggaagcagctctgggagctgtggagtgagaacatgaggggatgtttgccactctgggcagctgctggggcagggacccaaacctcttctgacctccaccttctcctccagccactgccttccctactctctcctttgcatccccacagcatctcagaagggagctctctcaaagtggaacaccctgagataaggctaagactcagcctacaccgtcagccatagcccaccctcgcccaaggaccacccatgatctcgggttgaatgggctctgttttcatttaacatcagcagcccatgcaggcatccaggtccctgcaggctcatttggaagaggaacgagaaggggaggatcagtcatgtctgaactcttctctagaggtggtgggtgacgtactgagagctgctctgggtggacctttcctcctagttgctgtggaagcaggccccatgtgagcgcctcactcccacatgcacctgccacccctgccctcgacccctgacctctcacacccctgcctctggctcccgagcctcagacagcaccccagcctctgcaaggcctcctgccacctccttctcccaagaggtgcctcctcctatacagttcctaccagttcctgcacatgtcttttctgttacctggcatgtttaaatctctctttatctataggcaagccttcttgcggtctttaacatgtgttgtttaattttttcgttattatttttccttaattaagagacttggtaatgtttgcatagacttttgatgcactgaactattgaataacagcacagagcagatgctttagagttttgatctaagatgtttggaactacccagcccaccacccccagctcctccatgcacccttactcccctctccactccatcttttgctctcagtcagttacactgccgtgttatcttgcctgccagattcttccagattagagacccctgtctgctcctcttttagcagatggactatggaaagcggttgtcacacttgtcatatgtcccccgctgtagtctggtgccccaaccctgctcaccctatagctccagagaccatggcccctctgtctccctgtgtctctgagaactgtctttgtccggtgtgtgtgtatgtgtatgtgtgtatatgtgagtgcatgtctgtgtgtgtgtgagcatgtgtgcatgtgtgtatgtgtgtgagtgtatgtgtgtatgtgcactctctcttaacttctcccagtaaatcctcagatcatttttttaaaattagtcttcctactcgtgctctgagactcctctcccctttctgaatggaccccagttttgcagctggatgagccccaagttgctgttcccactcatacacataaaggccagagcttctgtgcccagagcttgtgccatgcagtgctcagccgtgggagacactgcagggagagaaacaggaaagacagggcagcagtgggctctgccctcaggaggtttcctttccagacagcagtgcagagccacattaaaatctatgcagaggggccgagagccccacagcaggaaaacgcagaaaggtgaccgcaagctgcccccctgtacagtggcccactgcagctctgggggtcctatgggttcttcctacagtcaccaaggccccatcgctcagtctgcaattttctcccaaactattcatgtctttaaagaaaaagaaaaaacaacaaaaaagcattttctaggatataaaatttatacagaaaagggggctctgttggggatagggagggggcctgaacccgtccagcagctcctgacattggaatagtggttttctatttacaagtcactttgcatttatctgacaactctaaactaccctttaaatttgacaggtaagaattctcatccccaatttgctgatgctaaaggtgatgatggagagattaagtacctttccagtgcctcagagtcagcctagccctcctggggccagctcacttcctgctaggccagaattcctggtttctgtactccacagtgccttttggtaaagagaaacctcacctgtccctcctggtgtactgccactagccacgacttactcagaacttacattctgtaattgatatcttaaataagcacagggttttttccactttctaaataagcaataatcagccaccctgagagttccgctgcccctgtgtcctcccatactgagatgctccgggctgaggcatttgtggctttgaagtcccactgaaggattgtcgggggacagggtggcaactgtgcatgtgactgacagcaagaggaggtgtcctgagacccaacacctatttcagagccactttctccctctcccacacaactgatggcttccgaaccaaaagaacaaacataacatcccccaaggcaggaaggcggtttgggagaggagaaagctggacttgaagtcagaaaactggcagattgttgagtcttgctgctgcttcctgtcaaagcgttaccaacatgcccagagactctgttttttcatctgtcagaggaatgtggtatttacagcagtgtgttttgaagctcaaataagagcatctatttaaaaactctatataaactggtaaagcactgtggaatgggaggaactgtggcacccaggcaaatgacattccttccaaagttactgctggtgtcactcggagggcctagtctccaaccaagaccttttggttagtctaattataacttacaacccacagtcgaaagccctgtttcccagatatgcttagacccatagagatggccaacaggtacaaccagatcaaagccagcacacacacacttaccacggcccataactctgggccttgaggggcctgctctgaaagcacagtccggcttgaccctgggctcacatcgcagccagtgtgagggacagcagcttaattgagcaaggtcgctccctcccactagattctgcctccagggcattagcagcgtatgggcggccccagcattttcttccaatcccatgggatccttcagaaaatcctgcatccctgggccctgctccgggccttcccaggtatttttagtcatcctctcatcacaagacatatattcccagggatatggtctatttggaaagagtctacattgttagcctcagtgtgatccatgagggcgtttcacctgtaacctgccatctttaactcctaaacccctccccagatgccttatccaccctaactttcctccaaatattccccacatttaaactcgtctcaccttttctcttttccgggctatggggccctccctctcaggaaccatcattcattcaatccacagcatttagagtctcacttcctatacgtcaggcaccgtttgaggcacctgggatccatcagctggcaaaccaaaagcccctgccttcacagatttgcattgtagaagggaataatcagacaattcacaatgcaatgaggacagaaaataaggaactcatacggtgtgttagaagatgatagacgttttaggaaaaaaagtagtgccagataagggggctccaaggtgctggggagcagtgatggcaggcattggtttaaataagatgggcttccttaaggaggtgacagttgaacaaagcaaaggcatgaaggaattgaggattctccatgtggagatcgggagaagaggtagcagggcaggaggagccaacctggctggtgcggactgagctgggaaaggagaggtgagggtagcagaggggtaactaacaggttccacttttgggcttttactctgagcaagaaggggacatactggtggctttgagcagaggtgtcacgtgacccgactggtttttaaagagaccactctggctggctgtaggagtcaagggtggaatctggaagatcatttagaaggcaaatgcagtcatccaggtggaagatgcatagcgtggagcaaagttgtggcagtagaagcggtggaaaatggccagcccgtcactctgttttgcaagcaaaattaacagtgtttcctgacagactgcatgggggcaggaggagaattgcccaggaggactgggaggtttggcctaaatcagaggaggatggagcaggtaggcaaggaggcgggctggaggcggggcctgtgtgagttaggaaatgccagagcacagttttgacgtatctgttagcccttggaggggagatgtcaggtggacacacaggtcagaggcctggggatggagtcattcacaacaagatggtacccaaagccccggcactagagaagaagaagcgacaagaggcagaggagcggagaggcctgggccagggcctctggcgcgaggagatcgggacccgcaaacttctgttcatctgggagatgccgctgaacaactgccaggtgtcacaagaggaccgtcttcaggccccctcgtgcggtcatgctgaattcagcctcagtatctgagccatgggccccggcccttctcctgccaatgcatcacctgggtctaaatccgagcttttcttcctctgtgagccggggaggtaagagtgcgatgtcctgctgctctagggaagcctcttgctcttcctcagtgcttgggtctgaaatcatattttcctgtgattgttcgtgaaagttactacagcaccagaaactgctccctaaacatcccaaactggaattaatttgactgcttgggccaacagcctttcccgacacacttctttttcattttgtattttaaaatatactgaacaatagaaagtgctgggcagcctgaattcctgcattatggacatagagaaacattcccaagttgtcaatgaagaagccttgattatgcttccagctctggtgacttagagcaatgaactccattctctgggcctcaatttccttgaatgcaaaagtgaggagtgagaggtttaggatggtctcttgcaactctagcctgcagtgattctgacttgggcattttctgacagctggaggtggatgcttcattgcccccattgccttgctgggttctgaggtggtgtttcctgtcatcaggcgcccatggtgtcatggggatgcttcctccagggaatcatctgcatagagataatccctgaagccacagtgctgaagggcagcaagggaggacaggctcccttggctttggtggagctcacctggagattctccagagaaaaggagcaggagaaagaccttcggggagcagagcaggcacagggaggggaaagaacactggccctggagcttctgggcacagctctcaggaggaattgctggaggctttgcacgatgcacaggagtgtccagagcagggaaataaagctaagcgaaggtggcactggctgtgaacatgagaagaggaccgacatgaggatgacctgatgagcacggatcaggcatcatgctgaggacaccatacacatgatcggatgaaacccgtgtgcttactctccacatgaggaaatcaaggctcagacaggacgaacatctgcccaaggccacacggtgaatgggaggcaaatcttggattcaaactcatttctgtccaagaattggctcttgcatttcacagtgcccgctggctaaatccctgggccaggctggcctgggcatcactgaagggcagggcccagtggctcctgcactcctcattcagtgcctcctggcaacgggacttggggcggagctgcctgacttgacttctctgtgtcggttgatgctgcggatgctggatccacaaagcctgggatccccctgggatgctcagacagaatgcaggctacacacccggatccgtgtctctggttacagggaacagaaggcaaacgccaggaggcgcagagcagcaccactccctttgcccagttggcatctgcatctgcagctgaagaaagagactgggaggaggggggccagaaggagcaagcagcgacaaggcagggcagagagtgtccagggatcagcatgtcgggatactggtcccaagtcttccccaccttcaggccctgaaagcctttctaccttagtatctttccaccataggcccccaggcacaacttcctataactgtcactcactactctccacaacaatcacaagcaagccgggctcctctctggctctgggtcctggaaggatggaggaaaagcagtcagtcctgagtcatagagagagctacttgctgcacgtccaccccctcaggggtgagtcagctcagcctgcacgactccagccctctctctcggcctgcaacccacagtgcttgcgttggacagtgggcctggctgtctctgtctgcctttgtggctgtaaccacgcctcctgccccctgccatggcagagaaggggccagaatgggcacaagaaaggcaaggctgagtgccccccactgcccatagctgtgatgaggaaggagggtagagagatgtggtcagaaagcagatttgtccaaggacattagggtgtacacaccttagagaccacctagcccaaacccttatttgtttattcctcaaaggtaccttgagcacccgctgtgtgatgttgcttgaggatatacaaattttctagatgaggacacaaaaggccagaggcaggaaacagcttgctcattttcacaggtttttcacagcaagctgaccggaactcccggtcagtagggggctccagtgggtgctgttgccaaccattgtctagatgacattggtgggtgtggcctgagctggttctaggacacatagattaaatcaagttccgtggtctcaggacagctgggtggggcagaggttatccttgacatctccctccagccccccttctcattgctggagcctcctgttgccctcggagtcccttccagcttcttcccactttcggcaacagcccccacccccaacaaacctaatgctaccaagatgccttgtttcaaaatgaagtgattccagcacagtcattcatgctgggtggtagcaactcagtgagctgcccttctaatagatcattgtaccttgaagagaaggcgatgctcaacctgcaggtggaatgtttattgtatctcaggtgagcctttagcaacgtgacccctgagtggggagattacttttgtgaggtccctccccatccccccacaaaggctgttttctactctgcttaagagtatggctggcccttgagagagttagcagagccaccctcattcctagaagtgggatgaagcatctgaccatcagcagtcccctgggaggaggccgaatgccccggatctcaaggtctagggcgaggcttgttgtgtgaactggtgtgatgtggggttgagggggtgcagacagagagacgggcctgagaagtggcctggtgcagcaagtcttctcaaaagcttttgccttgagaagtaccctgcaggtttgacccgaaaggtcatgggaacctgtttttttataggcatccaatttgggttgttaattcagctgtgtgagattgccgaggtcctgatgcggctctgacccatccaggctccccttgccctctgccttctgccccaaactgtgtcactttttgtttccctcaaatgctctttcctttcctgttctcatcttatcaacccacatacggccctctgttcccttcccctccgtgtaagggtgggaggaagttgcctagcacaccttttgttgtggccagacaactgattgtacctggccagtgtctgacacttcagttcctacaggctcagcaacctgctgctggggttctttccagaaagctcgtaaagcaaaggcacctagaagatgccatgagctggtagtgaggagacacaggaaggctcaaagatacgtagggtgcctcgagaagcatggccacttctgttgatgcccacttactctcatatttggtgctcccacccagggaatcatctgtttgtttcctttttgagtctctgccccgccctgcctcacccactctgtttctctgcctttcttctctatcttgtgacctctccctctggcataaggaattctttgatgtagttagtactactggcaccttgatttcattcgtttattcttcatgggctttttgttggtggaggttggttggtttgtttgaatgactagacgctgggctgtccttcccaggggaagatgaaactcccaggcaattctgtgatcagtcttgtttagtgtgtgtttctggcaggtaataacaccttgggagccatcaggctgcacatgataacagtgagaccctgaggcttcagccacttccagccagcaaactggtcactgcagccagtagcacagggcatagctctcagccatccacagcttcacacacaaagcaggaagagcaaaagagggccaggagctgcagccccacgctgggagcccggctgccagtccccttggggccaaagacccctcgaggggagttctgaaggggcatttcaactcagtgtctgtaactccaaacacacaagaaaggcaagaagggccctctccttctagctggaattccactttggagaaacacaaaagcccgtgggtttccgacctgggggtggtggcccgggacagagtcctttccatggtccctgtccatctttagctttatcctggtgcgttccctgccctttgtttgtcttcttctgctcagttcttctcctccatcacttctgtctctccactcacaccaaaccaaaatgggaattctgcttagaattgctttcaactacgcatacctcattcatttgctcttctgtctgaaagccatggcctctaccctcagcttctgtctatcccagctaacgtttgtttaaccttcgcctctcttagcaagtacctgttcattcagctttagaaggcttgcagcttaaaacatgtttgcctttggcctccttaaaatgtcttgccccgctgccatacccagtggctccaagattcagcacctcccgactcctcctgagatgtgcatttctcctggtgggaaggggagataaaaggatcgtgaggatccccccacacacacccttaacctacacctgctggctcctggccatgaagttggcgtcagatgtctccagcagcccctgacccctgccattcccagctctctctctgcaccagcctgaccacctcctcccaacctagatcacctccgaggtctctccctcaaagccccaccccttggtcttcctccacaccatgacaccccccaacagaaccagctgttgtgtcttgcaggtcaaattgagattggaggtagtacaagcggagaagcggagcatggggagggggtactggctggatggagaccttcaggtggcttggaatgaaatttatatcagatccacctccctaagttctggacaagacattttaaaaaatatagcaagggttctgtagcaggaccactatttagagactcacactcccatgacattacttttgacatctgtttcagaggtgcgtggaatcttagtgacactgaggtcatagcattgtctcaatggcagccattggaattgggcagccgttttctgtagggctaagaccagccttccctggaggagatcagaggtaatctgcacctttcaaaatcagcctgccaaggagaatgcagccatggcttatgcccccttcacaatgctctctggccacctgaccgcaggagagtattgtggaggacaactgggttgggtattccagcctagagatctactgctcagcccctgaatttctataattcttacccttggctgtgctttaaaaaaataataatttttaaaaaactttttttcgtatggtgaagagctatttttcaactaccttttaagtctccagagagaccatgtaatgtggcaaccaggaaacacatcctgcggcctcccacaccatcctggtgggaaaatcctccacctgggaggatcctgtctctgctggcctctggcattccctgagtatcgcccctcagcatcctaaatgtggcctagacctggcactccaatgaaaataagtgcatagtgagtgccttccagaaacaaagacttcatccactgaggtgttacttctcatttgaccctgaacttaattcagaaagacagctttccagagacctccctctcattagctgccctgcaccactcccctcctcactgccagttctgccaaaacaaggcaatctgcataagcatattgaaggaaggaaatcgtctttcctttctgtttgccctgagcctgttatctggaaccactaaccagagctcgctgtctctgaaaatgcccgacctctgcctcagatacggaataataacctcatttcatttatatcaattacgtgaacaaattaagttaattgccccaatatcatgaaatcattgaaaattaccagatcattagaaaacaaggatgaaagaattggctgctcagaaatttctccacgcctaccattagtggagacagtgccatatgaaaaatcagccagaatgttcaggttatgtaagcagctctgttggctgccctaaaaggggaatgcagtctccaggcttgggggtgtatgtcttcagggaatcctacggcccctttcttccccaagaaagaccacagatgggagaaactacaaactaactcagggcaccggcagcaaatctgggaaggggtcagagattaatggcccaagtattgatggctaccaacaaattctgaatttacatccaaaggtagaactgatgctttgtagtttctcaaggggctgtacttggtatttaaagagagtggcaaaccacagaaactaaaagtgctgatcctgggataccacagatgtccaactccagcaagtccaatctctccttccatctcagcaggggattcatttgccaaggcgaaagggtaccaaagactctaaggatgacgtgggatcatgtaggaaacgcccagggcatcagtagacctcgggggccttgggggcaggggctgtggcttaggctgcttcctattgttaccatgtagaaatcactcagggattgctctctgatttcatcgcgagtggttattcatttatgagaccacggaccttgtaaacagctcctcatgtggaaacaggtgtgagcggtggtagaggcaacagtgtcctagctactcaaaaatgccctgtgaacagcatggcttaaggctcaagaaaaacttaatctttgagtctctagattcttccaaagttggtctctttggagagttgtcattaccggggcaggagaatgccacacagacatctcagagcgtcctcattcttcctctttctactgtcctcatagctgctcctgactttctcttgtctgccattatagagacatgccataggaaatgttaaatcaatacatgttactaaaatacaaaatactatcaagattatctgaacagatccaaagtcaagtcttgaagtgaaatatgacttaaataaatgaggtcttaaatgggagctataaaatgcaacaagaaaaaagacagttaagacaaatgtttaaaaatcccaaatgaaggattctgaatgtttaagaagtaaaacaggttttttttggttttgttttgttttgtttttgtttttttgatgcctagaggttggttcaattaggccaggcaagccaagtacctgggtgcgttgtcagaattatctccattttggtcctgttcaggctgggattgacccagaagaccttcaagcatttgcccagggttcttagaagtgatgagcagctgtgatggttttcaggatggatccaagaggccagcaatggctcaagcttcctgggagctctgcccaacactcaggagttaacatggtgtaggttacctccctctggacctccctccctgccccactgaagcctgagaaacacagaactccttgtccatgagcaagggagctcaagcactgggccaggagcggggcagaaaggtgccagtggatagctagacctgaccatcctgggcaactatcacacaccagagcaaaaggggtttaggtgctttgccaagaaatttcttctgtgcatgcctgtatgagagagagagagagaaagagagagagagagagagagagtgtgtgtgtgcgcgtgtgtgtgtctgcctatgtttgtctctgtgttcaatctcagtctgctagccaaatcctagggaccccacaccctgcaatcacaaggactgacctggcaggtggaatcttcatgaagcagaagctgagatctagagatccagatttagagtgttctgtaaagcctagagaagtgtccctttctttctcctccctcacctcaccctatatctccaccatcccctaaaagggcatcctaccaactagctatgaaaaaaaaaagaatttgctgagaaatctgttacccaagaaatattttcaggctgcaagcaaatgtctagttgtgcacatttccatccttcaaaaattccataacacattttccttgtttgtaccttaaaaacagaaatacaagagcaaccatctgaaagtggagagtaaaagccaagtcctgactttctagaaagagttagcagctcagatggtcaagatcagtcggggctgagccctctgtgctggagcccaaaacgtaagggcaccttcccagatccaggctccaggaactcggggagagggctggccctgggatactcaccagaggccagtttcctcagctcctacccccaaatgagttcagcagtcagacccgtgagaacagcttcctggggtgttagtgtcctaaattgtgtgcagggctttcaagtttagaaaacaattcaacagtcattatttcatgccaacggtcagggctcgccgcacctatagaccaacagctaagcaaggccatctcctgcctgagcctgagctttcagaacaagccccattatggagtgggttgaggccacctctggaggccctcctcagtgttgacttgaagtcggtctcccctaaacctgagaggccactgcccttgctttgtttaaatatatgtgggcaaggataggctctggggtcagcaaggcctctgtccttcagctggccctgcctggggtaagctaaagtgcacaaagcctaagtcctcataggttaacaatggctaataaaaaacaaattaaaacaggcttggcacagtggcttacaccggtaatcccagtactttgggaggccaaggcaggaggatcgcttgaggccagcccacgagtttgagaccagcctgggcagtatagtgagaccctgtctctaaaaaaattaaaataaaaaatttaaattagccgggcatggtggcacgttcctatagtcctaactactagggaggctgatgtgggaggatcatttgagcccaggagttcaaggctgcagtgagctgtgattatgccactgcactccagcctgggcaacagagctgagaccctgtctctaaaaccaaaccaaacaaaaaaattataaacctccatccacaaaatcccaaagacctcatctgcttatctaataatattatgaatgtgagttatttaaagggcataggtaggagaatgcctgtgggtccttgattgacatgagacccagcaacacagaccccacactcatggggacgccccaggacctgccaggcctacgctttcacgtttctttcacttgtttccttttgccctcttctgccactgtgttgctcccgtgtcagccaagacctagaataccgggcatcttcatgggagactcattacagcttatctctatctgcctttctttaaagccagctgaacatacccaatgctctccctctatggtaagaccaaccctcccgaccatgctcccggcttccgtgtccccctctaacacccccactctccccaccccgaactccagagtccctgggagccctgcctggctctcactgcatgtggccactgtgtctgccgtgtgccttgcctgcctgttcccttctcgtgtgagctgtgaagatgctgtttgtgcagtggtggtgttttacccctgagctttccttggggtggtaattcactgtgatcttgactatctaacaagccactgggagagaatgggacccgaggtccatttcctgttaaacaccctgaggactccaccggccaaagcctctaaccttaatctgataggagaaatttgcagagggtacctatgagagccatggtagggctccagggtaaggagggaagacaggtgctctaggcaggagatggaagggtggacgatgattcctgttaatcagtgtctgtggctcctagcttccctgtgcttcaagtgaaaggccaccataaaaggtttcagctgggatttgttactgagcgcgtgattgaatttccagtcactccaaccttgctatcccttgcatttttctaaattcctgaagtccgttaaaattaggctgcagccactgttccgcagcaagctggaagcagaaaaacaagctccgttgattggaccactcctgttgtaggagtctctgattcgcgttggttgaagtgataaaagagacgccattcagtgtgaccttgaagcctccttggcccagccgcctccaaaaggctgccgttatgcatttctaaccgggccaagtatgagtttttagaaggaccagtggggttgattgaccaagccaccaagtctgcaggccgaggcaagcttgggtgggttgatgtgttccccagtgcagcctggcgctgcctggccacaaggctgccacaggaaaggctgagcccgggtgctctaccccgcttcctggggactctgcttctgggatcagccatctggatctgcctcctttttgcattgttatttggtttattagagcaaattggtgcatccgaatggcagtgagtttattctccttctcgagcagcattaggaaactgcagccacaggggagggctctgaacagtggaatggaattcacgctgcaagcttggtgtttggcgttttttgggtttttttgtttgtttattttgtttttttaactgagcagatccagatgcccctgtggcaccaacttctcaaactcttgacacttgcagctaaagttctccacttaagcttgttcttttttttctcctttctcgaacacggtggaactgacagctgagttataaaatcctaagcctcctctgcatactcctctggggaaacacaacctccttttaaggagtgaaaatagaagttcaagcagatacacaggtgatagaaatacagagattaaggtcatcaaaggcttcagaacacacaggcagggaagagcccagggcaggacagggctgctgcctgcagctcttgacccagcccctcaggtacccgtgcagcaggtcccgagtcccacctgtctgtcccctgccttgaggggaacgggagccttaggaggaactgaggcagctctaattttgaaatataagaaatatttttgctcttctcctgtttggaagatctggaaagcaggagaggtctctggcttgcttctgggcagagtggtggctgccttcgggtctccctgcttccctcataatctcctgtcctgcatagtgaggggagcggcctctgacgcctcatcagggtgggccagagcaggcagcgcagttagaagggctttagcgctggatattgccagtgagagtctgacctagaaataattaaagataaaaggcaaggtaaagcaaggagtggggagggcccaggtggccctagtaacaacctgagccctcccacctcgcgggaggtgtggacgggaccagtaacaggaagccccgagggtccattctctcccggtgcccgcaggtctgggtgagctgcactagctccggatttggcagtggcttcctcctgggttcctgctcaccaggccgatgtgggcaggaggagggccaagtggggagtcagctcatgttctcaggtttggaggcagaggaccgcagggcagcccgtcctgccccctgagccctggccaggcatgtgcccaagcccccaggctcccccaggtccaacagcagcagcccaagcacctccagtcaccttggcctgcactccacccttcctccccttcaccttccctctccccttccccagggcccctgagggagaccatctgcagaagcctcacttgcaagggaggcctcccctcccttacgctgcccctctcccttccagggtcttgtacagcctgaagggttggagcctcctagaggccccagggcagaggggagtaggagggcaacagcttcggagcaagggctgcaaaccagaccctctccagcactgagtagcacccgtaatccctccctttgggacaggggctgtggaaagtagaaggaggtgatacaaggaaagtgctggagtcccaagcagctggggcatgaggtccttcagggggcagcccaccaggacccccaaatccacgcatacctacagctgggagagaggccagccaccaacccacatcctcggagagtgctgggctccacttaggacacaggactgtctgcccagacaaacgggagacaggctaggactgcttcctcagcagtgcagaggaggggttcccagggcagctggctctgggcctagaagattccaaagcctatggtagttcctgatggagtcgtctgtcctccatccagggcattaagaactaggaatgaaggggaatcggggagaataaaaacacaggaccacagcccagcggcctgggcacagtctagctctgcagagaccatggggctgggctgtccactcattaaagtgggcggccgccctcccatcggagggggaagtctagtgcagcaaaccctggcctgccttccgccactgccactgaggtctgtatttctcggaggggccctcctgttctcacccccctcttgctgtgctaactgcacctcctgttgccgacgggttccagaacgcagaggaaaactcccgcatctccatcaccttcttccgcctgttccgggtcatgcgtctggtgaagctgctgagccgtggggagggcatccggacgctgctgtggaccttcatcaagtccttccaggtagccgcccctcatgtcctgcggcccggggaatcgcagggctgccgcgtggcccagaacacagctgacacaaggaggagccctccactctggggccctgctccttcctctgtgtggcagaactcggccgctctgcctggctccctgtttccgcaccgagaggcctagacgaagcatgtggtttccaaggcaggctcagagccccagaaggccaggtggtaaaggagggatgggagctaaggggaggcagaaagggtctgccttacttttaaccatcgtttatgtctttctgcacaagaatttactggacaaaggggttttgtggtaaggaacaaacctgaaaaacacgggcctggacaacctggtgaccgctatggcccttcgagttcagcatttccagaatctggccatcgccctcctccccgtaggcgtttcagcagcatctgctgacagcacctgtcatgtcctcggccagagtcgcaggaccctggtgtcctccgctcggctagagaggcccttcgaatgggcccaggactgcctggccatgtgatcagttcctccgctcagccattgttttcccattaaaacagagtgacaatcagcccctgccagctcggaggagtctttgtaggtttgaagttaaggagaagcaaagcgcttgggtcacttgacttcccccagatgagcgcagaacccgtgaaggcggtttcatgcttccctgggctggcggaacgcaggcttctctccccccatggaggggccgctctcagcctttccaagacgagaatctgtcagggaagatggtctttgtgtgccccaccctggccagtccctgcccggggacagggcatgcctgggcctggtccaggtgaggaaagatgcccgtccccgctctgcccccagcagcctcctgccagggactgaccatccaaggctctcgagggagctcccaatggccaggctgacccctgcctagtgatgagctggggctcctgcactctgagcccagctcagcccaggctctggggattcggaatagtagacaccagcggaagcaggactgccgctgactctgtacttgggtgcacgcggaacccacggctgtgagttgccatactctccctgcccccccgacatctcctggggctgggaagaggcacagaccgggtgactgcgagggcctgatggcggcgcaggcgttcgggccaggcagctggcgcctgctctgacggcaccctctagtgaccggtggccacggctgaagcggcgcccgggaacacgggctgggcctcccatcctggggaccatggcctgtccccagaagtcacgggggctctggaaaattagttgtctgagttgccaggcagataatgcatggagcgaatagagcgtatggaacccagctctgcaaggcattgcactaagcactttataagccttaaatcttttcaaccacaaaaccgctgagaggtattattattgtttccatttttctgatgaggagactgaagttcagagaagttaagtgccccaaccctcacagatagaaagtggcagaaacaggatttgaacccatgatctttcttttaaatttttccttattaaatgtttccattgcaatagtaatacccgctcactacaactagtgggatggaattaagctgtgtaaagaaagggtgtaacttgccaccaccccactcctccacaggtaaccacagtcagcggggtgctgtcctccacgatttctcctgcctcgtacagacacaccgcacatgtgtagtcggaggaggttttgctcgttcttgattgttttgcccaggtagtgtcgcactatatcgttactctgcggcctgctttgaaaaccaagctgaaatgggaagtcagttccggtttctcagaccttctcgcaggttccccgtagtcctgtgggactcttggaagtgtcccccggcccaaaccgggcaatagctgatggctgcagagacagggatgcggcgctccctgggaaggggcccagctggcctctgcactccagcctcatgggagtctcctgcacttccttccaggccctgccctatgtggccctcctgatcgtgatgctgttcttcatctacgcggtgatcgggatgcaggtagggaggctcccaccacggggctcctggcctcccgctctgtctctccccagttcccagcaccacattccctaacgccttcctccctcccttctccctttcattcctgactgtccctctccctcctcttccattttctgaggcccaaaaagccacaggaattggaactttccccaaatggatctcctgtaggtagcaggagaatgtcccggtacagaatacacagcccagagagcctccctccccgaggcctgggttctgctcttggtagaggaaagacactctccagttatgcaaggggcctcgggacagacacagccccttctcaagaaacagcagcaaggtgtgtctgtttgtgtccagcacccctgtttgtgtccaggtctgatgggcctgagagttaccccaaccagattcatttgaagctaatggctgagagggagggagggaagaaggaagcaaggaagggccaaatcaacacaaggttcaccgcatcaaatgtgcagcagttttctggggcctcccctcccaggtgcccactgcaccattcaccgcaaacctagggctctccattcccgtcttggggctccagcttgagtcccaaggccaaacttggcagggcgcccacactagcccaaagcgcttcctcggccgctccttcaggaagtcccctacttgctcatcgcagaaagacccaagattcagttgccaaaaccttttgagactaaaagagctaccttgatacctgataaaggtggcagtttctaagataagcacagctttaaaagaccaggaagaaaagggatttcaggaatgcattaagcttgccctagcctcagatcactcactccacatcactccaaaatgcaagaactaaatttgaaagagtgcttggacatgcagaactgaaatagcaaagaaaataacgcagtgcgtcctgtgtcctgtcagaagcaggatcccggtcccagcatccaccgctctcagccccagctcccactgggctgcagggaccttcctgaggctgtgggcactttgattctcatgcttgtccagtgtagggatttgggctcaggggctgggtggggcagcaggtgcctgccaggttgcatgggaagactgttcagcttgtggcagccagttccagggacacctgagacccctgaagagaccattgaacaatggtgggaaattaggaccctatctgtccacaaatcactgaacacctcttccttctctctcctaggtgtttgggaaaattgccctgaatgataccacagagatcaaccggaacaacaactttcagaccttcccccaggccgtgctgctcctcttcaggtgggtccctgaagacataggtgcacagatacacacacacctgcatggtgccacactgtggcctggtggtagaatgaaagggaactgcttcccggggagtaggaagggagaggatgtgttgcttgctctctgcctgacaaggaggccagtgggtccattgtcatttatgataactttccacagagcaacccactatgcactggcacacctgctggaaaccagacaaaaccattaggggagcaaaagtcacatgctaaaagcagcctggcttggaatctgaacaggcccaaagccaacctgccgacacgctttgtgaccttgagtgagatatctaacttctctgaacctcagttttcttgtccaataagtacagatatctatcactataccagcacctgtgccatttgccgtgctgggcgcttatgtccacatgcactgggcgtcatcctcacttaatcctcaacacaatactagcaaactgaatccaatagtacatgagaaagatgatacatcatgatcaagtgggtttcattccaggggtggttcaacatatgcacatcaataaatgtaagacaccatattaacagaatgaaggaaaaaagacccacatgatcatctcaatagatgcagaaaaagcatttgacaaaattcaacatcctttcatgataaaaactctcaacaaattaggcatagaaggatggtactgcaacacaataaaggccacgtatgacaaggccacagctaacatcatacttagtggtgaaaagttgaaagcttttcctttaagatgaggaacaagacaaagatgcccactctcaccacttctattcaacataataatactggaagtcctagccagagcaattaagcaagttttaaaaagttatccaaataggaaaggaagaagtgaaattttctctgtttgctgataacatgatcttatatatagaaaatcctaaagaccaccaaaatctattacaactgataaactaattcagtaaagttgcaggacacaaaatcaacccacaaaaatgagtagcatttatttacactaacaatgaactatctgaaagagaaattaagaaatcagtcccttttacaatagcatcaaaaaactaaaataaaatacttaggaataaatttaatgatctaaactgagaactcataaaacattgataaaagaaatagttggtgacacaaataaatggaaagatatcttgtgttcatggattggaataattaatattgttaaaatgaccatactacccaaagcaatctacaaattcaatgcaattgctatcaaaatgccaatgtcattttttatggaaatggaaaaaacaatcctaaaattcatatggaaccacaaaagaccctgaatagccaaagcaatcttgagcaagaagaacaaagctggaggcaccacaatgcatgatataaaaatctgttacaaagctacagtaaccaaaacagcatggtactggcataaaaacggacacatagagcaatggctcaggagagaaacctgagaaataaacccactcatttacagccagttgattttcgacaaaggtgccaagaacacacagtggagaaagaacagccttgttaataaatagtgttgccaaagaggaaaaagggaattactttcaaaatcatcattagcattagacttctcattaacaaaagtatatatgtaatagaagacaatggaataatatgttcaaaattatgaggaaaaatgtatttttgaatctggccctctaaatacagtctaatcagcattccagtagtcaagcaaaatagagacatttccaagtgtttaaggacccataaagtttactccccaacataagtcttccctggagcaattactcaggctgtacttccacagaatgaaaaatgaatcaaagaaatagaatgagcagagtaatgatatgagtaaaaaataatgaagtttatagttatgagttatgaacaaggacattataaagtttatataaagtctagatacttgttaaggggaaaatgtacaaaaccttaatgacaatttggaagtaatattttatgttatctctacaaggtaggaagtgaggtggtagaagaatgagaaacatgaaaccatgctaagattcttctcttgtttggggataagagtatatactgtttaattctgtacataactaagggaaaagtgtgtatacatatatatgttaaagatttaaaggtcaatcactaaaaaaatagaaatggaatgtatatattctaaaccactagaggaaaaaaatggatggataaaacttagcaatccatcaaaaggaagctaaagtaaaagtagaaaaataaataaaacatggaaattagaataataaaatgagatggcaggaataagaacaaagataataattgctaaacttattgaggtaaagttcactattaaaacatagatactctgatgttggctttaagaaatctagctctagcctgtttataacagctacagtaaaacaaaatggcctaaagaaaatgcaaataaaaggatggaaaaacgaataccatgtaaggctcacaatgtagacgtaataatagcagtagcagaagaaatagaattccaggtgaaaggcattaaacaagacaaagagggattttatattgataaaaggtataatccatcaaaaatatataatagtcataaaactacatgagcctaacaatatagtttggaaatgtatcaattacataccaatagaagtataaggagaacacacacacacacacacagtggaagatttaatacaggtagagcatgacagaccaaatagaccaaaatagaaaaaagggtaaagaatatctaaataatacaattaacagacttgaacttatcgagttatactcagtaaatggccaaaaaaaacacattctttttaaacacctcagaaacattcacaaaaattagccaagatttaagtcacaaagaatttaacaaattctacaactgcccctactttgatatagccaaattagaaattagccataaaaacaaaaacccctccaaaatctacttaaaaatttggcactcttcttagtaactcaaagctgaaactacaatctacagtcatgcaccacatgatgacatttcagccaatgacagactgcctaaaattaaaatggagctgaaaacttcctatcacccagtgacgctatagcatcaaaatgcagtgcagtgccttactcaggtgttcgtggtgctgccagtcatagataagtatggcccatacaattatgtacagtacataatatttgataatgagaataaatgactgtgtcaccggtttatgtctttactgcactatacttttatcattattttgcagtgtactgcttctacttatttttttttaagttaaccgtaaaacagccttaggcaggtcctgcaggaggtattccagaagaaggcattgttatcataggagatgacagctccatgcatgttagtgcccctgaagaccttccgataggacaagatgtggaggtggaagacagtgatgttgatgatcctgaccttgagtaggcctaggctaatgtgtgggtttgtgtctcagcttttaacaaaaagctaaaattaaaaaaaaaaagttcaatattaaaaaaacataaaataaggatatgaagaaaaatattctgcacagctgtacaatgtgtattttaagttgcgttattacaaaagagtccaaaagttaaaaaaaatttaaaagtttataaagtaaaaatgttacattaagctgaagttaatttattactgaagaaagaaaagtactttttataaatttgtgtagcctaagtttatagtgtttctagtctccagtggtgtacggtagcgtgcagtcatgtcctaggccctcacagtcactcaccactcactcactgccccacccagaacaactttcagtcctgcaagctccactcatggtatgtgccctctacaggtgcaccgtatttaaatattttttactgttccttttttactgttcctatttttactgttccttttcagtgtttagatatgtttagatacacaaatacttaccattgtgttccagtttcctgcaatattcagtacagtcacatgctgtataagcttgtagcctaggagcagtaggctgtaccacagagctgaggtgtgtaatagctacggcatctaggtttgtgtgagtccactctatgctgtttgcacaacagaattgcctaaccatgcatctccccactgttaagtgacacaggactgtacttagaaatgagggccagggcaccagatcttaaacgtatgagatgcatcaatcagcaccaaagaaaaaattcagagcctgaaatttatttatttatctaaaaagctgtatattaaataagctaatagatggggaaaagaatagtaaaataatcccagaatatgaaggaatgcatttttaaaaataaaagcataaattaataaaatatggattttatcaataaaccctaaagctgatcctttgaaaagaccaataaacagacaaaccatcaaatccaatttttttaaaaaaaaacacaacaacatcagaaatgcaaaaagcaacataattacagatgtggaagtgatttttagaatgataagagaatttcatgcctctgttttgtggcacttcagaggtgatcatctacttcaagatgaagcagaaagtctccttcccagccagtggctgccagaaactcattgaagtggacagtgaatgcaaaccataccttttatgagaagcatatggcctcagaagtcgctggtgccactctgggtgaagaatggaaggcttatgtgggtggaatcaatggtacaaatgacaagcgaggtttccctatgaagcagtgtgtcctgacctgtggttgtgtccacctgctactgcatacggggcattctgttatagaccaaggagaactgcagaaggaaagcacagattgttcagagttgcattgtgggtgccagtctgacttcttaatttggtttttgtacaaaaagatgggggggagagaaagatatttctagactgactgatactactgtgccttttcacctggggtccaaaagagatggcacggtccgataacttttcattctccataaagatgatgtccatcagtgagtaaacccctaaacaaaggatgtcaggaacccaggaccaaagcacccaagactcggcatcttcttactccacatgtcctgcaacacaaatgctgacgtattgctctgaagaaacagaacactaaaaaaaaaaataagtaaggcccggtgcggtggctcacacctgtaatcctagcactttggaaagccgaggcaggtggatcatgaggtcaggagttcgagaccagcctggccaagatggtgaaaccccatctctactaaaaatacaaaaattagccaggcacggtggcgggcacctgtaatcccagctactcgggaggctgaggcaggagaattgcttgaacccgggaggtggaggttgcagtgagccgagattgttccactacactctagcctgggcgacagagcaagactctgtctccaaataaataaatataaggaagaggttaaacaatatgctaaacttttggccaagagaatgaaggagaccaaagaaaaatgccaggaacagatttccaagacatggaggctatgctcactgagagcttctgagtctatcaaaaataagattttcaccaggcatggcagctcacacctgtaatctcaacaacttgggaggctgaggtgggaggatcagttaagaccaggagtatgagaccagcctgagcaacacagcaaaaccccatctctaaaaataaaaaataaaaatattagccaggtgtggtgccatgtgcctgtagtcccagctacttgagaagctgtagcgggaggatcacttgggcccaggagtttgaggttacagtgagctaagatggctccactgcactccagcctgggtgatgaagtgacatcccatctctaaacacatacacacacatacacacacacacacacacacacacacacacacacaagatttttctaagagtagcagacaaataatatcagacttttaaaaagaagacagagaacatcatgaacaaatatgcaaatatatttgaaaacctaaatgaagcagacgcttttatgtagaaaataagaattataaaattatcttaagaattaaaaaaaaacaactacaacagaaattgaaaaggtagttgaaaatttagcctttgaaaaggcccaaggttcaatatttttatttgtgaggtctaccagactatcaaggagtggatcattccaatgttatataaactttccaggaacagaaagatgtagaaaacctcttcacccactccataagactaatataaagctaatgccaatgagaaaaagagaaaaaagcaagcagttataaatatgaaaatatgtacacataattgtcattgtttgcagacaacaggctaattcaagtagaaaatccatgcaaattaactaaaaaccctttaggacaatagaattaataaagtggaagattaaaagattaacaaagaaaaataattgctttcctgtactggtaataactaattagtaaatgtaatagacaagatcttatgctatcactttttcaatgttattattttgtaactcttacccaataaaataagacaggaaaggccgggcgcagtggctcacgcctgtaatcccagcacttcgggaggccaaggcgggtggatcacgaggtcaggagatcgagaccatcctggctaacaccgtgaaaccccgtctctactaaaaatacaaaaaattagccgggcgtggtagcaggcgcctgtagtcccagctactcaggaggctaaggtgggagaatctcttgaacccaggagatggaggttgcagtgagccaagattgcgccactgcactgcagtctgggggacagagaaagaccccatctcaaaaaaaaaaaacaagacaggaaaaataaatcaaaggataagaattggagaggaagaaacaaaattaaatgccaaaaaagttgattgcctgtgtatatatacaagaaaaattacagaaaattgctaaaactgataggatagtttagcaaatattctgtaatatgaaatcaattgtattccctctatatcagcagcaaatggacatagcttttaaaatataatgttgaaactataccattttaaatgtacaacaaaataaaaggagagagatgccacgtttctggccaggagacttaatatcataaagatgtcaggattctgcaaatgaattgacatctcagtgcaattctaataagactcccaacaggattattcacagaggctgaaactgattctacagtgtctatggaatagaaaaggaaactgaatagccaagacaaatgttgaagaacaacaggttggcaggactcctgcactgtgagagggcaggacttactataaggcaacttactatgcagacaacacagtacttctgtaccaagataaacaaataaacctgaggaatgcaatgacaaggctagaacaagacccacacatctacgcaaatacaacttacggcagaagaaatatttcaattaagtaggtgaagatgtactattcaataaatagtattaacaaaatgacttatctatgcagaaaaaataaaagcatatttctacctcatatcaaacatgaaaataaatttcaggtcaataagttattgcggaaaaacaaaactttagaacctttagaagaacacagaaaagaatgtctttatgacctaaaatagagaaagattttttaaacgtgatgcaaaaagcacagaacatagaggaaaaaactataaatttgacctcattgaaataaaaaacttagattcaccaaaatacaccgtaaataataccagagacaacccacaaattggaagaagatatttctgttgcatataactaacaaagggttaagaatagacacgaaaccaccatgagactccaccttcctcctgcaagaatggctgcaatttaaaaaataaaaaataatagatgttggcatggatgtggtggaaagggaacacttttaccccgctggtgggaatgtgaactagtacagccactatggaaaacagtatgaagattccttaaagaactaaaagtagacctaccattccatccagcagtcccactcctgggtatccacccagaggaaaagaagtcattatgtgaaagagacacctgcacacacacatttatagcagcaccatttgcaaaatgatgtaatggactttggggactcggagaagggcaggaggatggtagggatcaaagacgactgcttgggtgatgggtgcagcgaaatgtcagagatcaccactgaagggcttgtccgtgtaagcaaaaaccacctgttcccaaaaaactattggaaattttaaaaaagaatagagaatagagtatcttttttttttttttttttttttttgagacggagtctcgctctgtcgcccaggctggagtacagtggtgtgatctcggctcactgcaaactccgcctcccgggttcacgccattctcctgcctcagcttcccaagtagctgggactacaggcgcccaccaccgcgcccggctaatttttgtatttttagtagagacgaggcttcaccatgttagccaggatggtctccatctcctgacctcgtgatccgcccacctcggcctcccaaagtgctgggattacaggcgtgagccaccgcgcccggccagagaatagagtatcttaagcaccctacaaacgaacaagaagacaacctgaatcaaacaagcaaaaacatgaacatgcaatttaatggaagataaaatttaagttctcaacccactaatcattttataaccaaattaaaacagcagtgacatattatctcacacaaattatatgagcaacatttaaaacaattcactaatgaactgatgagtttgtacagtagtgttatttctcctacactggtaataggagtctaagttggacaaatccttggaggtcatggaatatctagtaaaaataaagatgcatgtagtttaactggcaattccacttctaagtggatacccaagatataaatctgcatgtttattgcagtgttatttgtactagtaaaagaaaaaatgaaaaacctaaatgttccttaacaggacagtggatttttttacggtaagttcatagagcatactcctgtacagcagttaaggtgaatgaactggaactaaaatacatccaaagggctaagtctcaaaaacatcacatggattgcaaaaacagcaagttttcggaaaaggtgcaatttgttactgtttatataaaattttaataatgctatgtgtttcatatttagcaaatatatcagagcattcagggaatgatgaacatcaagttcattttagtaactccctctggggaaggaggaaagggacaggtggggagggatgcagagggccctccttggcatctgtaggatgggctgcatgaacgtggctctccctcccctccaggtgtgccaccggggaggcctggcaggacatcatgctggcctgcatgccaggcaagaagtgtgccccagagtccgagcccagcaacagcacggagggtgaaacaccctgtggtagcagctttgctgtcttctacttcatcagcttctacatgctctgtgccttcctggtaagccaagggggaactcaacagccagcagccatgactgcccagttccagggcagtctgaaccgtccatctctgcagctcatggtcagggcaaccctatcagaggagctggcttgggaagactaagttggcaggagtgtccagccacatggagagaaaggcagaaagccctgggccagagtgagctccaccagcatcttgcttgtctgttcttggctgttgtcatggtggcattgtcccagaggacaacggggacatgtgggggcctagaaagaactgtacttttttggcatcttgctgaggagtgaggaaaaggggataaagtccccctctgtcctgcacagccctgcccagcagctcggtaggagggaagctgtccagcccacctgtgggttcatcacacacaactctcagggaaactgtgtcaagtttatgtccaagagacccaggttctcaggctggtaggatggatgactggtctttagaaatgttggcttctgccatcagtaggccccagctggcaagggggttccagaggcaggtgtgtaggaaggtcttctcacagcacctcattgtactgttccccacagatcatcaacctctttgtagctgtcatcatggacaactttgactacctgacaagggactggtccatccttggtccccaccacctggatgagtttaaaagaatctgggcagagtatgaccctgaagccaagtaagttcccagagggaaatcctgattccccaagctgagagagggtatagctgaccatacctgcaggaggggctcaaggttggccaacactgggtggatcaattagaaacactggattgtatcacaccctagggtgaaaggtcaagggccagcaggaggaggcccggcaccttcaattaagtcaagaatgtatctactaggttgggtggggtggctcacacctgtaatcccagcattttagaaggcaaaggtggttgaatcactcgaggccaggagttcaagaccagcctggccaacacagtgaaccccatctctactaaaaatacaaaaattagccggacatggtggcacatgcctataatcccagctactcaggaggccaaggcatgagaattgcctgaacctgggaggtggaggttgcagcgagctgagatcacaccactgcactccagcctgggcgacagagcaagactccatctaaaaaagaaaaagaaaataatatatctactatattcagttgaatggaaggataggaaattctagtatcaggaataactagtaagtgctcaagttaggataggtagggccggggaaaatcttgattccattcccgcttctggtctaaagatcaatcacattcggctgaccctcagtaaataccttttggtcagaaggttagttcattcaatcagcaagtatatattgagaattttgttgcactgctaaaatcccttccaccttgaacatagcatgggcagaaaatgattcattaaaatctaaacacgtgtatatgtatattggtttggggctgtgtcatgcaattctgcaactctgtactgagtgtgactaatagggctaccacactgtgcagtgttgcccatatgagtgggccctacccctcaggcgcatgcgtcctgggctgctggcagagaccgtggctctctgatgccctgtccctcctctccctcctcttctaggggtcgtatcaaacacctggatgtggtgaccctcctccggcggattcagccgccactaggttttgggaagctgtgccctcaccgcgtggcttgcaaagtaagagataacggggttcatgggagggagagggaaaataggggaagtgaagtgcccatttcttgtgatcctttaagggaatgaacatactagtttatgtgcctaaagattacattttaagggtccttccagctctaaattctcagactctatgagggaataacagagtgaatgcctcctgtcctactgagccagggacccagtcctggataaaggacttgttcagtccatcccactgcaccatccgggcatcctggggtgggagacttcccagcctaggctagaggggttcggcgttcttttcctggagttggaaggccattagaaagcccaggcattgacttcaggggtctttgagtcctaaaatttttcataaaatcactaaaatacaaagtttaccagggagaggatttctcactttaatcagattccttagtgagaccatgacccaaaaaaaaagtgtcgtttccttttctccctcccctccaccatggccactccacgctccttttctccctcctctccaccgtggccattccgtgctccttgttggggcaataatgagctgacagagagctgggggaagggagaccagagggctggagagaggaggaaactcagatggcaggaggattcggctctgtgagaatccactcatggaaaacgcagattgagggaacatagaaccttctacttgtgctctgtttactgagtttcttctcatttgtgcctccactttgctccaaaaacaaacaaacaacaacaacaacaaaaacagattttaagagatttccaagggcatagaaaatatcagaaaagagcataaaataaatgcaaggtacaaacaccatgcaaggcaagggtggggaggggtgcagcctggagggggctaaagtgcgtccgttgtggcctccggacgggcctgggcaggctgaagcctgggtgcgaaactttccggtggccaagatacagttcacaccgtccatgaggctcatcaagatctggtcactcaggagaagtgtaacccttctagacactgagattagcaggaggtcaccgtgtgagctgacaaatagccccccttgagcatgcccttggcatggacgctgtggtgagcttcacaccgcgcttgctcgtcatgacccattgcatgctgaaggccccacaccagagctccgtgccagggaagcctgttctgggggtgtgtgctgggaaagaagagggcaagacagcactatccagtgtcagcaagcttctgctccaacttgatgcagaagcatatttgtcaatacacagagaggacatgtagcatctcctgcaggcaaagctcctgtgatcctttctcttctctgggctgtggacgaatgctgcctggcaggtgggctcccagcacatgctggcgtacagccggtctttgctgccagtggagagcacacctgcacgcctgagcagactttcgagcagggcgcaaagttgggtggccttcacatccttttgtggaagtgaaggtctaatgaggacaaatttcatacctctcccactccacgaggagggtcaaaagtagttgtggcaaaggcaagattctccctggaatgcttcagggagcattcactccctgcccactccagcaacacccacacaagctgcgtgtcacccccagcatcctctgtgtattaggccatccttgcactgctgtaaagaaatacctgagactgggtaatttataagaaaacaggtttaattggcccacagttcagcaggctgtacaggaagcatggcactagcattctgcttctggggaggcctcaggaagcttccaatcaatcatggtggaaggcaaaggggaggcaggtacgtcacatggacagacagggagcaagagagaagggggagggaccacacacttacttaaacaagcagatctcatgagtactcactcaccaaggggatggtaccaaaccatttatgagaaatccaccccatgatgcaatcaccttccatcaggccccacctccaattctggggattacaattcaacatgagatttgggcgaggacacagagccaaaccatatcactctgccacggtgttctgcggtcccctaagcaccgcctgccatcatcaccagctttgcttctcttcgcctgcagcgcctggtctccatgaacatgcctctgaacagcgacgggacagtcatgttcaatgccaccctgtttgccctggtcaggacggccctgaggatcaaaacagaaggtaaggtcgcccgtgggcactgggagagacactcagaaggtctagcagacaatcagagaggagctcggcagcctgcaaagtgctcaagggaacttcctgccccagacagcatccgagctgggatacgggggtaacgtgcgctccaggacatcgcagggccccagcctgctcatgacttctttgctcctgaatggtctccctgcctctagctcaggggtttccaatcttttggcttctctgggccacattggaagaattgtcttgggccacacataaaatacactaacgatagctgatgaactgaaaaaaaaaattgcaaaatactcaatgttttaagaaagtttacgaatatgtgttgggccacattcaaagccgtcctgggccgcatgtggcccatgggctgcaggttagacaagcctgctctagcttattcattttgaactctagctttccatgaaactctgggactcattctgggtggtatcttgaagtcagagggtatagctcacaaaacagaaggagacgggtgttacctgaagcaggaccaacccctgtctaaaagaacttacactggctacaggtgggtgtctcaaatgctcaactcattaaattaataggactgtgctgggaagacgtgtgggaaaggggacacagtgacaagtggtggccgtggtggaggtcatcgcacacattgtgcgggctgagcctggcttaaggctcttagccagcggacaggtgaggattcagacctcacctgtgccacctagtcagaccgggctccctcagggctgcgtccacctggaggggcccttctagttttcacaaggcaccctaagggctagcagcagcctgagtgagataatctgcttgctttatgatggataagagtttgcgaaccactatgggaaaggctgtattaaacacacctaacaagataccatttctctccaagagtgtccagccttggagtgtctagtgtttcttagagcgtggtcaaaagaccaccgctgcagaatcagctttgggtacctgtttaagctactgagtcccaggcacccacacagacctgctgatgccaaatccctgagcatggggcccaggaatctgcatcttgaaccaactacagagatgattcaaacccactggtgtagtaattacagaaaacacagatgagacaagcagtatgcttccttccccttcctacacttccagcttaaagctcaggctgtccgtcagtgtgttcctcggggcaacagaaggagccccgggcaggtgggaggctcgaatccgagtccctgctctctcactaatgacatgagtatgagccatttactctctctctacttcagttgctccattggtagactagagaaaggtgatgacatctgggaatttaattcattgaataacccagacatgggccttctctccgttagatccttcaaaaacaataacagaaacatttcaaatgaagtgaaacaagaaccagtccaccaagacacaagtcaaaataattagctgatttttaaaaaataaaaataggggccaggcgtgctggctcgtgcctgtaattccagcactttgagaggcccagtcgggcagatcccgaggtcaggagattgagaccatcctggccaacatggtgaaacctcgtctctactaaaaatacaaaaattagccgggcgtggtggcacgtgcctgtaatcccagctactcaggaggctgaggcaggagaatcgcttgaacctgggaggcagaggttgcagtgagccgagatcaccccactctagcctgggcgacagagtgaggctccatctgaaaaaataaaataaaataataaaaataggacaagttctgctactaaattaaaaaaaaaaaaaagagcaaaggcttaaaaaatataccatcagtagccaatgcaatcactcaatctgaaatgggtgtaaataggcctatttctgactgccagaaaaccaaaacacactttttttttttttttaaatggaatctcgctctgtcgccaggctggagtgcagtggcacaatctcggcctgctgcaacctctgactccctagttcaagccattctcctgcctcagcctctcaagtagctgggattacaggcacgtgccaccacgcccggctaatttttgtatttttagtagagacagggtttcaccatgttggccaggatggtctcaatctcctgaccttgtgatctgcccgactgggcctcccaaagtgctgggatgacaggcatgagccaccgcgcccggccaaaacacacatttaattcacacatatgtgtgtataacaaggaagaaaactgggaaggaaatgtgttcgtatgctaacactgattatcatgagtagaaagatcagcagtgacatccaccttactcctttagtttttttactttccaaatgttctgcaaggaatgttactcccctatgttcagagggaaggagaggcgatataaatgactgccaggaggaatatgctgtaatacttaaagattgatgtaaattaaggatgtgagattttgttccctagaggaacaaaaggcagggaggtatggaagcaagaattcagcagggtcgaaggttcactgtcaaagccaaccacatgccaactaaggaagaccaatagctagtaacaatgcgaaagactgaccagtcaaatgcagggacccaattctgaggaaataagagttccagagaaaagaggagaagccagccatgtgggaactacaatcctgtcaagaattacagactatcttttaaacacaaagacatttcagaacagctaccaaagggcccgaaacgcccccacccaagggtgagccttcatcagacatgggccctccataaacttgttaaaatcgaaacgcccccacccaagggtgagccttcatcagacacgggccctccacaaacttgttaaaatcctaagaaagaaagacaaagtcaagtcttggaagcaactagaaagaaatgtgagaagacatctacatttgtgaagatgaggcttgcatcagtcctcacccttcagacttctcagcgtggaaggaattggggcgaaattaacacctacctcagagaagcagagctgtcatcccaagtccagtaccaagccaaagaagcttctctcttggaacgtagaaggaagagctctcatcccaagtccagtaccaagccaaacaagcttctctcttggaacataaaaggaagatagtgaaaaatacttagatgacatgaaacaattgtcggtgaacttcaacaattacatagaccatcatgagaataaattaaggctgataaaaaaaaatgaaaggtccttttggaaactatgttaatttcttaggtctgctgtaacaaatgatcacaaactgggcagctggaaacaagagaaagttctctcagtttaggagaccagagacctaaaactaaggtgtcagcagagttggttctttctggaggctctggggagagtctgttccaccctttctcccagattctgagggctgtggatgatgcctggtgtgcactggctcacagcacatcacgccatctgtgcctccatcttcaaatagcctccagggtcttgtgtcctctcctcttcttggaaggacaccagccacattggacttagggcccaccctcatccaggatgacctcaccttaactaattacattggtgaaaatcctatttccaactaaggccacattctgaggttctaggcagacatgaattttgggaggacactattcagcccagtaccgaagctaagtatatttgaataccatgtgtgttaggatcttgcactgcgtgtgtcagaaacctccagctacctctcccgtgatggggactgatcatctgtgcagctggaaggcccaggagtcgtcccctgccttcaggtcctgtttggatctggcatttggggagctcgggattccgtcaatccctctactgccacctctgcatgctctgccctgtggccccagaggtggatttgaacccaggcagtctgacacaagagccctcaaccacaatactggactgccggtcctatgcgagagcagtaaacatcccgtgttggtttcctactgctgcaaagcaaattactacaagcttttcagcttaaaaagacaccccgttggctgggcacggtggctcacacatgtaatcccagcactttgggaggctgaggcaggtagattacctgaggttgggagttcgagaccaacatggagaaaccccatctctactaaaaatataaaattagctgggcatggtggcccatgcctgtaatcccagctacttgggaggctgaggcaggagaatcacttgaacccaggaggtggaggttgcagtgagccaagatcgcgccattgcactccagcctgggcaacaagagcaaacttccgtctaaaaaaaaaaaaaaaaaaagacaccccgttagtagctcatggttttgcaggtcagaagtccagcagtggtgaagctgggctttcataaggcaaatccaggatattgatcaggccatggtctcttctggaggctctgggggagatcatgttgttggtggaattcatttgttgcaattgtaggcctgagatcctcactttcctgctggctgacagctggggaccccctctgctcctagaggctgcctctctcagttcagcccacatgactgtttgctttcttccaggccggctggagagaactctgcctttaaagggctcatgtgactaggtcaggcctgcctaacctccctgtcttaggtcataggtgccgtgtgccatataacctaatctcaggagtaaaatctatgatggtcaggggcccagggctttggcagcatgtgtaccctgatgaggagcatcttagaatcctgtcccctacatctgcccttacagctgtaaggctcagctttcctttttcatcactgtaaggctaggaccccagaggctgcataaggcaggcatctaagtaggggaactcgggacagagccctcatcgacagatgtaccctccaatcatccatgttccctgtgactgccgaaggaggtccatgagaaatgccacccatggggaccagccccccactgcccgtggcagggccatacgtgttccagctggtgagcgcatggccgccattgttcctgcccaggggctgggctcagtctacaaggaagagcactgagtgccggtggaggggccccctggctggcctgagccacaggcagggggaaggggacaggaatggcattggacggggcacaagagggaagggggaaggaaggaaggtggacagaggaaggggaagaggaaggaggtggaaaatgggaagactggggagaagtgaagcaagcaagaaagaaactgatgagtcagggttgcgtggggcagatgccaccatctgtggcttcctaccttacgcagagggacccagcccatcagaggcccaccaaggggctgaggatcctttccgccctgcagggaacctagaacaagccaatgaggagctgcgggcgatcatcaagaagatctggaagcggaccagcatgaagctgctggaccaggtggtgccccctgcaggtggtgagtgctccctggactcccgcaccttggccactgcctggccgtgcccccctctgcctgcctctcctccagctgtggcacccttagaatgcggaagcatcccctgagacttgcttcttgagtcccctaggcttgctggaggtctgccttcagacccttcctgtggggctcagaggccctgttggttagaagggaggcaggtgcaacgccctgcacaaactcagaaacagaaagtcaggttggaaatctggtacaaccctgctttttacatagggtaacaggcaagtccctgatgcttaggggtttggcagaacttctaaagaaactccacaaagtataggtttcccataaacctgattgctgtaggattgctctaaggccctcaaacgagaatcccctgagattcctcccctcttggatgacattctttttgttcttccaagagcagtgtttcttgaccctatcaagcctcaaatccctttttatagcaaagagtttatattgcctttactatgatcctgaatgaaaattataggtaatataactttcctatacatataatttccaaaatattaatataatgccttcactctaacataaaatctattaaaagcagatgtttccaatatgtaaatactcaggcataactataccagcaggtacatttaattgatgagatcttctcatgcacccacttacaacacatacggctgggttcacaggaaacaagacaatactgaatactgtcaacactttgatttgccattttgaaataaggggtaaatcagtatattaaataagtgtgtgtataaatagccccccacacataaacacacacacatacttacacatatgcagaacaaccgtgatgtgacacttacggtgagtgacccacacaccctaaagagcattgccatcaggaatacagttttccaaaatgcgaacctctcttggccaagtttaaataatccaaagtatagttttcctcaatttacacagcagttgtattcctggaaattgtcaggtgtgttaaaaccatgcaaaacaatgtcctgtgttcatttgcaaaatgaaattatgttccgagcccagagactcctaagcagaatcatggatgtgtggcataagcttgagagccatgcagagtgcaaagctgtgattgcagaacatgcctgcactttaagggacaggtctggagctacttaatgctagtggcacccccacagtaccccgacaactaaaaaccaccccacacatttactgtgccctccttaagaggcgacaccacttgtgttgagaaccatttgccagagggaaagccggatttgggctaagcgaaaatctcgccagtgccatgtgatgtttacatacatcgttttattgaatcctgacaacatttctgtgaagtttgctcagggaactaaagttcttagaagctaagttgctggcccaaggttacctggagagtccacagcagattcaggattcaaacccaggccccagggaacctaggactccaggtaggactccaggcttgtcccaccatgcagttcttccttcctgactatgctggacaggggaccctgggtttttccctcccacgtggaaagggggtgcttgccagagaagggaggggtcatcactgctatggatgtggctattttggagggacaggtaggaggaggagaaccctcaccagcccctagatttaatccccagctgtctcttgggcccgtggcatctcttcacaaagaaccaggaggtagatccaaggggctcctccccaggcatgaaatgtttcctctaagaacttatggcttctccaccatcaggtttactcccaggaaagggactgatgatgtcacatataatcttgggtatccagcccagcagggatgcagccaagccacctggcacaaaaactcaatcgggtttgaaagaaaaatccaaacttccatgggaagaaagccctccttccaccagcccctccctccgagctaagctgaaccgttttgcacttgcacttggaagagtggccagttgatgagggacatttgaagctctggaatcaaatgtatcagttcagttaaaaaaaaaaaagcgggaaataattttgatggtaggctaccttttgcataaaaaaaacaggagataatatgtttgatgatttacataactaatttgcactaagaatctctgagaaaatactcaagaaactagatgatctacaggaggtggtgactaggcagataagggctgtggtgggagagacttttgaccataagcctttttatggttttttttctctctttttaagccatgtgaatgtattacctctccaaaaatattaaagttttaaaaagttttggatgctgaaaaaaaaaatgaatgaagttcaactgaattcccctgctcccctcttaccccctctcccctctccatacgtctcagatgatgaggtcaccgttggcaagttctacgccacgttcctgatccaggagtacttccggaagttcaagaagcgcaaagagcagggccttgtgggcaagccctcccagaggaacgcgctgtctctgcaggtgagggcctgggggcgggcccacactccaggaaggtcctggtcattgcctctgacctccagtcagggtcccggtccctccccagcaggctggaggccaggtccctgcagagggaacctttcagagagctccagacctttccaaagatggctgtgagaagggggtgatgtgcccttccctacctgccacccaccgactgccctccatggttctgcctgctgtcatagcccccagatctctcaaatacttcactgaggctcccgtgacagcccctgacccctggtgccccgtcctaatgagccttcatccctcctggatgggcgagtggattgttccatcagagggcagcccagcccccagttcacacacacacaaaccttccggagggtcgactggctgggtggaggatgccagggccctggagggacaggtcttggcccgaggctgtggctggctggggagcttggaggaaagggagcgtggtcctcaccatcctccccttggattccaggctggcttgcgcacactgcatgacatcgggcctgagatccgacgggccatctctggagatctcaccgctgaggaggagctggacaaggccatgaaggaggctgtgtccgctgcttctgaagatgacatcttcagggtgggtggtgccatggcgcactctcgacccctataaagttcagtttggagcaagaggttgggctggggttttgcggggaacgtccaggggaaggagctgcaccagaggaaagggctacttccaggctcttcctgatgagctgtctcctcacccctttgccttttccaagcctgactccatcccaaggcagggctccctggaaacagcagctctcagtgtcactggctctcagagaagcgggaaggaaccgccttcctaagggaaatgtttcctaggagaaacttctgcattagaagttgcagagtggtcacccctggggcacatctaatctgcaggcttgttttgtttgttaatatttgaaaatcaagacttctggcattctttggaaaagtcaggagacctggtaatattaagcttgcattcccacagggcagcagagggccggagcctagaggcggtggccctttgagatggagcatagcgtgtgttctccaggtctccaagacccctccagaactcccctttccctctcctttcctggagactgaagctgcccagcagttgcaatagtgaaaattaaaacggctgtaccagaataaggggcgtttatcactcatttgtgttgcctgcctcaccacgctggtgtttggttacaaatccttctatagcaagggagaagctgccagccataattgtgcaggaccctgctcacaccgctctctcccggccgcgggcccagttcccaggctgtggaacacacagggggcaagctgagcccatcctgcccctgctccgtctcttcctcatccttattcttgtcactgggagacattcgtcactgagtggcctcagggacatggcatggtggtgacacaacccgacaagacaccagaaaccaaagcctcagtcaccaaggcccagggatgctctgatgtcaagggttggaacaaccgtgcaaatagctacttgcccacttccccaggacaaggaaaagaatactggggaaaaacattggctcctggttttaaatctctctgagtccccgaggggaaaaagaccatcatgcaggaaattcttcattttcaaaaccgtttggccaaccagcttttagctctgtgagcacactgggtttccattttttaaatctggttagaatcttctggtcgctctcccagcccccgccctcacggtgtgctggctgctcttagggaccaccatcctagacgtgccctggaaactcactcccagccttcaggggcttcactggaaacctccagggcagctcgtaccagcggcagccccttgcccaatcccatccccactggtgggtgggttctcccagctgctgcagaggggagtccagagccttgagactccgggtccctccctctctggagcagccaggcatgaagaaggtcctcaggtgctcctggctcccagcagggctgtgcctacccgaaagaaggcagcccgccttcccaggccctgcacttccctgacctggctgtggaggctgctctctgggaggagtgggtgctaaggggcttctccacccacccctccttcttgcctacagagggccggtggcctgttcggcaaccacgtcagctactaccaaagcgacggccggagcgccttcccccagaccttcaccactcagcgcccgctgcacatcaacaaggcgggcagcagccagggcgacactgagtcgccatcccacgagaagctggtggactccaccttcaccccgagcagctactcgtccaccggctccaacgccaacatcaacaacgccaacaacaccgccctgggtcgcctccctcgccccgccggctaccccagcacggtcagcactgtggagggccacgggccccccttgtcccctgccatccgggtgcaggaggtggcgtggaagctcagctccaacaggtaagtgggaggctggccaccccaggcggcacacagggcccacgtgctgcaaccctcaggagacagtggaggagacggaggcctcggccagccacttgtccctcaagcttccaggaggttgctgccccagactccagcaagagcaggaggcactatgctgtctcccaagtcctgcccttgatcagacctggcaggctcagggcaagtcagcagtggcctgcggcgctggttctcccacagggccctctcctctcccacacttcctgagtggcagaatgtgatcatcagatgtttgtgttccggcttcacaacagaaaccatcccgtctgcccttccccgagtctctgcccaaacctggcctttctcccagccgagatgggaatggtgtttccattgcttccctggagcccctttgccagcctcccggagagggcatcccctgtgggaggcgccatctgtagcactggcccattctgcccagcacaggatcattcctggaggtcttgactgtacctcttactcctgactcactcttttctccttgtcctctcatccctgtgctctaggatgcactgctgtgacatgctggatggtgggaccttccctcccgccctgggcccccgcagggctcctccctgtctgcatcagcagctccagggttccctggcggggctgagagaggacacaccctgcatcgtgcctggccacgcttcactgtgctgctcttccagagtaggagagtggctcccagcaggctgcacagccccccagcatgccaggttcttgacatgctcgccctccagctcagaaaataatagagaagtagcagcttccctctaaacccctggaaaagtgtccatccaaggagcaggcacacctgccgctggcctgcctgtccctgcagagggcccatttcaagagggctgcatgcaagcccatgggactcaggcatttaattgtgtcagacgacaggccagttaaaaggaccatctccctgtctgctttcctttctgcaaggttggctggtttagccacccagaagcagcactgggggcatccttcaattcatgaggcctgcactgctgccttctgtgtgcacagggcagtgtgctgggcactggattttatgtgccggcctgaagggctggctttgcataggagaggatctaatctaggcatctagtcttgggggcctgcacctgttgtgggggcctcatccttctctgcaacctcactccccttccacggcctttgaggacccaagtactgggtccccatacccccttctcccctctggcctcatgaagcttctgcttaaggagggctccacgtccgtctttagcatctcagggtgaactaattccccaccctctaagggcattttcatgtgaagctttgttctctgtgacataaggggagagggatgtttagaggagctgggggaggagaccccaggggatttccttgtccccacagatatatctctccacatagcaaaatacatgcaaagcacccggcacagtgcccagcacacagtcggtgctcatgaaatgtcggttccctctgcccactgcagatggtacaaacaacacacagggcatcaagcttcagcttggtgaagaggaggagcatagcccacgtcccagctcccttgtccccgtgtcacagctcaaggctaacggcagctctagtgccagcattgcttgtgctgaggatgggccagcacgtcctgtgcccggtggcccccaaaagtgctgctgcctgcctgctgctgctctgcgtctccagctcctccctccgtgcttcaccaaagcccactccacctccctcccctcccagtcctcctggagctcccacctctcatctttccttccactgcggggcgggtggcagtctgcagtcctcctcctcgagagagagaattgcttctaccctgcctgggatgctcagagccagggcactgatttagcactcggctctgagaggatggaccaggatctttctctgatgccctcaggggtctgaggataaagtgggcccagcatgcaaggtctatagaaagcaagacaaagggaggcactgagctgagctcagacaggaaaaggaagaggccttggtccagagctaaagatgacctgaccctgtcccagcagggaaaggcacgttccgatgtgtgaggatctggagctcaggagggattcaggctcagcagggactcaggctcactgccttctgctcaggaaagcaaacccctctaggtgaggcttcctctctgtgcctttaccccagggtgccagtgtcagaatcaagggcaccatcaaaataagaggccaaggacttctcagctatgccaaatgccaaagacccaggtgtcatagctggaggtgagtggggggcagcctctaagttaggcagggcatatgtcattccaatttcatagggaaactgaggcatgaggtggaccaagtgacttggaccagagggtaagtggattggggtcaggactcctggatccacagcagacatccttctcccaaatgggaccctcaccctaatctgaacacttctatggatccatcagcaatcacaggagaacaaagcaccagcaactgtatgcctgttcacgtgtgtgtgcttgtgtttgtgcacgtgtgtacacctgcatgtgtgtgcgtgtgtgatgctttacttgctgaaggaagtggaggaaggttggcagtttctgatgtttttcttcatcttggatattgtaggtgccactcccgggagagccaggcagccatggcgggtcaggaggagacgtctcaggatgagacctatgaagtgaagatgaaccatgacacggaggcctgcagtgagcccagcctgctctccacagagatgtgagctctgctgccctctgctgaggctgacccaagtgtgggaacaaatgtggggaggcagaggcaggtccctgagatccctcctctggggctgattgcaggaggagaggagatcacagagaaaacatctgcaccgcctctttcatctcctcagtgaaatgggagccccccaacacacaacacacacaaacacacacacaccacacacacacacagacacacacaacacacacatacacgatgccctttttagcttggggtttcctcgccaggaaaatttctgaacattgttttataaacattgtaggctgtaagacacagtcataaatatattttctggtgagactcagtatgcacatacatatatagataattaaacaagtgtttcaagacactgcttataatgaagctgcccagaagagggcactggtggcaaagccaggcctgagatttttgtccttgctgccattcttagagtatttttagctgcagttctagatcctttagaaggtggtgacatccatttggtcactaatgactagcccttaaaagcaggtgcagcacagcacaatatcagaaactatcagaatgcgtcaaacgtcacaaaggtaagcgctgtgctgggaaacacttgcttaattgccaacagatgtggctatctgggggtctccttgagaaacatctttatgactctgagtcacatccacagaagtttgagacacagagtgacatccacagaagtttgagacacagtgtttccgaagcttttctggctcttttcaccctcaaagccctgtctcatctgttactgtatacatgactcacaacaggcctctgagacagagagggcatatgtcatttcaattttgtagaaagggaaattgaggcatggggttttccccagggggtaatgcctgggtcccatgggcttgcgtgcagccacttgaaaatgggccctctggagggacaggcaggccagcggcaggtgtgcctgctccttggatggacacttttccaggggtttagagagaagctcccacttctctattattttctgagctggagggcaggcatgtcaagaacctgggatgctggggggctgtgccacctgctgggagccactgtcccactctggaacggcagcacagtgaagcgtggccaggcacgatgcagggtgtgtcctctctcagccccgccagggaaccctggagctgccgatgcagacagggaggagccccacgggggcccagggcgggagggaagccctcaccgacccctcccagcatgtcagtccattcagttcctgaaaggacttcagagtgaggaaggactagccttgcaggcttttgaagacaggaaaggtgtggctggaggtggtgggaggggacaccaggtgccccaccctgaggagtgtggggagaatggcagccaggccagcacagcatgcggcttcctggggtccagtgctttctgctcgggaactggatgggaagagtagcagaagcacctccttttccccagcatagaaagaagaatcgagtgagtaaggaaaagcatggaaagagtcccaaccagcggcacttgacaaatcactcaactgccctgtgccttcgtgtccccatcagcaaaatgggacggtgggggtgacaggccttctacttttctgactcagtgaaacacggtcaatataaaaaagggaaatacctgaagctccttatgagataactgtctctaaattgattcttagagaatacaaacgaatgcctgaccacctaccctagaaatcaggaagagcatatattttaaactatttcggttattctagagtgcttggtgcaccaggcactctgctaggttgttaagaacccagtctccatcctcaaggaaattccacaaactaggaaactaagagggtctcaggagaggaagataacacagagtttctcactacccccagagtggtacaacccccaggggtacaggcgttcagagaaagttgagggcagggtgacctgaactggtaccacgcacaaggtgaaatggaagctggatctgcaagagccagggtgatttgcataagaagaaaatacaatagggaggccttagctagctgagagtaagagctagtcttgaaggtataaatactgcggtctgcactctaccagccttcctgcacatctataaatcatccaagtctctgtgctgtaccatgagcaggcatggagtcaccctcagaggtgtggggtggcaccagggaccagtgagtcagtggtctcatctgggaatgaggttggaatgcagctgtgcttcttgaactgcaggctgacccagcagagattgtgaatcaaaattttaataaaaatagaacagactaaagtggactgggactcaccagggtgcaacgcatgcaccgagggtaaccaaaggctatgaggtttcattccatcaggtgtgtctgtgcatgatgagaagctgtcaaatctacttctcatcgagtttccatcaaaggcctggaagccatagactagatgccccatgaggtccctcacagccctgctgttcacctactgagtgaccgtagagtggttgtaggcagctgcttatgtgctcttgctgatgagggggtggcagggcgggagaaatcgggggacgggcataagtttgggtgaaagttgagggtcactggggaaaacagcatcagctcatgcaaacacgggagccaaggccattccccaaaagaacttcatgggcctaggattctttccgctttctcaacacctttgaccccagagtgccttcactgccccaagtcagaactgcaggcttatgagacaggctgcgggtgaggagctggccattcccactgagcaggcctggaagacgtcaggggcaggccagaacttcttggggtggcaattccccaaacctgcatgtaagcacaaagtgtgcgtcccttcactaaggatcagagcaaagtgctttccgggggtgcagctgtccctgtgggtggccacttctcagcctccaggaacaagccccatgagctctctgttccaggctctcctaccaggatgacgaaaatcggcaactgacgctcccagaggaggacaagagggacatccggcaatctccgaagaggggtttcctccgctctgcctcactaggtaaatgcaccgctcgctctctggatgtggtcggcggttactccctagagaacactggtcagggatgattgggaaatcgttgtggcctgcctcaaatcagccccacacagtggggcatttccaaagcaaggagacaacattccaaaggcagggtgtgcagggatgagccctggacaccagaatacgtctcagacgaggggaggggaaaggaggagcgtctcgggccatagttactgctcctggcaccccaccagggtgtaaactgtcacaggccagtgccctgttttcctgccctgatggtggctctctggctggctttgcaggtcgaagggcctccttccacctggaatgtctgaagcgacagaaggaccgagggggagacatctctcagaagacagtcctgcccttgcatctggttcatcatcaggtagctcacacttttggacaggccactgtcacctgccagcaggccagacagtccccagggtgacggacaaatcctgaagacttcagtgggtcttgcctgtctcagatggctggcacgtcctgcccctgccctaagagccatccctgtagggcttcacactcctgtgcaggtgagggccacggcaaggtctgcagcatcgcaggtgggggcctaggaagtgctggtgcacaggagctctttgtgtgatcctgaggacccacagctgcaggttccacctgagctttcttcttaggctgccacagatgccactgacgcctctgacactggcctatgcctcagggcactcaggaagatgtacttgtacctagagtttgaatatacctggaaattttgccacacaaaaatccatccagtgacataaagaagtgattaaagaacccaccagcaacatggtcaagagtagggaatgacatccgtgggaagcaggtccagggagattccataaatgaaatgtctcttggcatggctgactccagctgagacagtgaaatccaagatgccaggaccaaacatgccttagtatctttgaacttcagtgttatctaaggccagtctattaaccccaggcaaactgaggtctaaacctgggtttcccaacattctgaccttattaaagttatactcttttatagcatggacctatgttttaaatagacctatgctttgtacccaaaggcattcaactgccaatcaaaagtcataatcagcatgagatggccagtgtggcctggctgagttgatagtacttcagctccaaaaaataaacaggttttcttagcctgtgtggtgttgtcttccactgggctttctgaaataatgaatatggccttacacttttctcagattcccagggacccaggagccccaggctgaggaccaccatgggcaggggcaggaggtggaaggatgtggggacactgtgtgtgctatcttaaaagatttctagaagtcgatttcacctatctgttcttgtcgtactggtaggcacgaaactctcctcttcatctctttctcctcctgtactctgtgaccctagaggtggtctttccccaccacagtgtcgctctctcccgggagcacatcccatcagagcagctcaccctgcagagcctctgccctggcaggttgtcatggcaacagccagacaggcctggtccctaccctcaggatgctcaagaatattcagggacagagggcgtaccgtgtgacttttttttttttttttttgagacagagttttgctcttgttgcccaggctggagtgcaatggcacgatctcggctcaccacaacctccacctcccgggttcaagtgattctcctgcctcagcctcccaagtagctgggattacaggcatgcaccaccatgcctggctaattttgcatttgtagtagagactgggttactccgtgttggtcaggctggtcttgaactcccgacctcaggtgatctgcccgccttggcctcccaaagtcctgggattacaggcatgagccactgctcccagccctgaatcttttaatcacaatacagcaccggatttaacaatggctcaaagacaacctgagctagagactggcagggcattatgaatggccccattaactgtgagaactaaaaccacaaatactggttttcccaactctttgtgaggtgcacagcgcttcttcacagacctcattgcgcttgagcctcacaccagccccacagggcagatggatagacagcattcgttttctggctttacagacatgcaggcctcaccctgctctccattctattgaggacaaaaccaagagcgagagaatgcacagctgacaggtgaccaggccagggctaaaagcaggttaccacgacttcacccaatcccagctttcagaagttacaggagaaagagatcacttcagacccagatgatcctaagatgtattttgagatagttgaaagtcatgccaggttgagataggaccgacaggggaaaataatggcatgggaataccaggcaggtggagctagctggacacagcagctgcaaagcagtgcttgctcagaagcaggggcctgccttgtttggggtcggccactcctattaactcacactccttgtgtgtccgcaggcattggcagtggcaggcctgagccccctcctccagagaagccattcccctgcctcattccctaggccttttgccaccccaccagccacacctggcagccgaggctggcccccacagcccgtccccaccctgcggcttgagggggtcgagtccagtgagaaactcaacagcagcttcccatccatccactgcggctcctgggctgagaccacccccggtggcgggggcagcagcgccgcccggagagtccggcccgtctccctcatggtgcccagccaggctggggccccagggaggcagttccacggcagtgccagcagcctggtggaagcggtaggtgactcgcagatgggcaggggggagaggccacgggcaacaaggggacttggcatgcggggctgagaagggagcacctggctcttgccaaattcattgcagtcaatatctgagcccgaaagaccctccctctcagggctgcaggagggctcgtgtgcggaaagccatgactgcacaagatgctatgggctctcttgaggctgggcccactgcagagggcggcagaaaccactgagcaacttatcccttatactgcagctgctcgacatgcaaatgtgagcctggctgcctttatacacagacaggcaagatccaaggtgctcaggcctgactgcccgtgagcatcacctggggagctttggaaacccgggacagattaactgatgattgttaaagctcttcgatgattttaacgtgtagcaaggttgagagccactagcctagaacaagcgagctttcagtcccactgtgctctgcctggtcagagcatctagtgcaatcccggcaccacattattagggacctttgacacactggaacaaacccaacagaggatgaccaggatggcaaggttcctagaaaccatttcctaggagaaccgtttcagggaattcgggaagaaaacctggagaggaggtgactttggagggtgcgatacacctctcacacctgcaacgggtgggatggggaaagggtggcaggctcagcccaccagcggacagatttcagctcacatggggaagaccttcccaaatgagctcttccaagatgagaggggcttgcctgaaaggtagtgagccccccatcatcagacatagccaagcagagactgtgctcatccgggcgtcaggctgtggtgcaggaggtggggcgttaaaccaggtggcttccaaggtttacctctcaaagtctggtattcctgtggcctcgatcatcctgcattcatttcacagaccttccctgagcgcctaccatgtgcaggccctgttctaggtacagggacacagctgagaaacagagcttctgctctcatgagctcacatcatggtgaggagagacagataataaacacatacatatataacacatcaggaaggtcaggagtgccaaagaaaaactaagcagggcaaggagagaatgagtggcgtgggcaaggagcaagacaaacagatgcctgaaaggagcgagtgccaggctgcactcagcttcccccgacccgctggctcaggagccgattttcccatagccaggcactaagcagccggtagggaggacagagaagcttaagggtcacctgctggcccttcccagcagaagcaaggcaggggcatgcgccgtgtttgcacagatacctcacccctggaaaggcagcagcaggcaatgggcagtgggcctgtctcagcagtttcaccagggagaatggtttctctgaaagaatagtataaaggttcagtgggtgtcagaaaggagagaggcaggctgggatctgctgatacagcatcagggcaaccccccggcccctctgagagccaaaccttctctggtttttgttttggttgttttttgagacagggtctcgctctgtcacccaggctggagtgtagtggtacaatcacagctcagtgcagcctggcgctgctggggtcaaatgatcctcccacctcagtctctggccttgctaagatcacaggtgtgcatcaccacacccagctaattattcttaaattttttgtagagacgaagtttccctgtgttgcctgggcctggtctcgaactcctgggctcaagcagtccttctgcctgggcttcccaaagtgctgggtgacaggtgtgagccaccgtgctgggccataagcaagtcttcatatatttgatgacagtgtttgaccaccccagccaaaacttctctggcctgcacatccctaattctggcagatgctccatctccacttgttccccatgggtgcccctcccaacacacacacgtacacgtgcacacacgcacacttccccaagtgacctaccagataccccctcgctctagccctcaagggaagagctgggctccaggagtaatgttcctttggttcttcatggctcccaccccgctccttcaggtcttgatttcagaaggactggggcagtttgctcaagatcccaagttcatcgaggtcaccacccaggagctggccgacgcctgcgacatgaccatagaggagatggagagcgcggccgacaacatcctcagcgggggcgccccacagagccccaatggcgccctcttaccctttgtgaactgcagggacgcggggcaggaccgagccgggggcgaagaggacgcgggctgtgtgcgcgcgcggggtcgaccgagtgaggaggagctccaggacagcagggtctacgtcagcagcctgtagtgggcgctgccagatgcgggcttttttttatttgtttcaatgttcctaatgggttcgtttcagaagtgcctcactgttctcgtgacctggagttaaccggaacagcgtcttcattcatttctgttgggaccagacgcggagcctgggtgcgcgagccgccctccgggaggaaggcgcccggctgcgtctgcagaggcggggagaggaggcggcgagggtcccggggcgcgaggaaggcgcctgccctctcccagctcgcaggccccgggcccggccgcgcctccgcggggagagcaccccggcttcccgcgcgccctcaccaaaaggaccctacagcaaacgggtgtctttcgactctgcttgtagaaaccatttgcacatattctgtacgagcctcgctgtctccctagagccagggccctgcggatttggagaagggagcggggcaggacttccaggaggaccccaacccggcccggagagggaggaggaggcctccaggggcgcggagctctggggatgggcgtcgggccggcagtggtgcggctcactccgtccctgcccacctgcgacgggatcccccgaccggcacgggccacgccgagctcccggccagccgccggcccgcaggcagcgcgagggaggagctgcgccgccggctccgcccaaccaggtggtgctgagcttccgctgagcgctcttttgttttgtggtttgacacttttcttgacagcatgttgcagtttcttttcggttttggttttttttaaatgttttattttgctttcccagcgggaggggaggaagaagagtgtttacaaagtcctgtagccccctcacctttctgttttcacttttgccaatgtacatcgggtttggttttcttgtattatttaaacggttgtggtttcctttttccacggaggttcaatagaagccgctgcaggagagttttaccaaccattgtgtatgcccaataatttgttatcatttccttaggtagtaacctatttttgttctggtttggttcggttatctaatggaaaggtaactggcaatgcacttgatgtggtcttgcacatgtgggtgatagagttgggttcctttttatgctgggtgtacaggtgggtttgggagagaggagcatgcgcgagagagtctccgagtgtgtgcgacgcgtgtgtgtgtggtgggttgtctgtgtgcatatgtcctgcccgtgtatatgcacccacaccatgtgcccgtgcacaccagtgactacgcagtcccccctttctggtttagctgtgggaagatctgaatctggggccgtttgaaagcaaaaacaaaccactgtctctgcttctgaaacgggaatcagtaactctttgcattttctgtcccacaagatatgcaaaaacaatgcaataatattcatttaaaaatacaattgtgagttgtgttggcattaaaactgtattttaaaaaaagacagaaatttaagggaaaaacacaagaaggcattttgcttcaatatattccgtgtaatgttttattgcattgataatgtttctgttgaagaaaccgttatacttgaattcaggtcagtttcagtatttttcaaatatttttttaaaactgaattgcaattgtgccaagcgaatataatgaattgaattaagttggttttcggattcacttcttgtatattttgctgcatgtaaagtaaatcattttgtatttggagtgtgacaagctttacctttgaactcaagtgcttttctatatgtggttgggggaaagggaacaagttttctttagtttgcacaatgagcaaaggtatcaccagtgtagtcattattctgctctccacaaacaggtttggacattactgttttgcatatcttgtgtttgcttacatttccctcaatttttccaaaatcgtttgctgggtatgtttgtaccgcctcttgctgtgagagaccaggacctattttattccagtcttcactctgtccactctgctctggtcatctgatttggtacttctccaagaacagcccttcactgtgaggtgcagggaggcgttctgatgagccctcagtcactgggccgtcatccgcatcccccatggaagaggtagctggctttcccttcccttccaccacacggaattttctctttggcttccttaggaaagtgtacactaaccgggaggataaaattaaagtcaggctgcttggagggaggggcatcctcacttccggattcttgttgctctacccaacaaggacagcaggggctcgagaaaggaactggtgaaaccctgatccatctgaaagtcaactctgcgtgctcctttctccatcccttcctcactctggagcagcctttccttcaggcttgccctaatgtttgggctgccggggagggggccaggacaagggaagaggcatccggagctcacagtgggggtgggaacagatttttgtgggggcatctctaatgctcacttatatctccctagaacatcactcttttggtgctgtgtccttcaaatgtatgtcaacagtggtggctgaaaagggactgctttggggaaaacaggacccaaccattcacccagaattgacccattaaatctcttccagtcctagtgttccctgagcccctcttggcacatatataagtaagctagaaattacaataagggacagtccattcctctatgacagcttgctggactgattcatgacaaagtggagaaatgtactcaatactccccggttaacacagtctagaaacagagtttctttatggatatccacacccaagtcatccaaactttcttgattccttttcactgccatcaaggtcctctagaaattgagtttaggtatcatcctttgaaaagttcccaagatttctaccaggaggtacacacaggcgttccctgtctagggcaggaggactatcctagcttgaccttctgatccactagaataagactggcgtatgatgcctgtcatcagaacagactggcacaagtagtgacatcaatgaaccacagcacaatcttccaagtgatgtctactctccacctaaaatggaattttccccatgaccttgtaaaacataattgtcacatcttccatacccctcctgacagcccccaagtgtcaggagaaaacagtcaggggctaagggcccaagggacttgaagaaacaacagtttaaggtctgcagtttggtcaacttaattcttgtcctccgaccagccctgcctctttcatttccagaccttggagaatttttcccagctttgattcagaaggtactagttataacccctttccttcttcttaatccaataggcctcactctcactgggaaatccactcaaaggaacaaggcaatgtctctcattctatttcccagttccaaattccaggtgcttgtctggagtgaagctacccgttactttctcccagcttttctccacccagcatgtctcctgcccatgcagctgaagacagtggggcaacctcaggagaagcagacctttccatgcccaagttcatctcctgagcaacagtgacacctagaaaatgaggactttggaagtcacccaaaagatggtggctactttatggagtcctgaagatacacagccaccactcctaaaggcaaagaaagaaaacacgaatgtaggtcagggatagagtggaaccctggtcatcggggtttttagcctcatcgtgggaaaggtggtaaaggaggatgatggcatctccatccctagaggccaagaattgaaatatcattgtcaaggattagaaacaattcagcaaagaggccacaaaaagggcctgctgactcccagaagacctctttaaaccccaggggaggcaaatacttgctgatggagtctgggccgtttccatattttaaagaagacctgcctctggggcaaatgtcagcacagagaggactgggaggagaatggaggcaagaaaagggcatattttgactccctctgtgcctcttcccagttcatggaaggatgtgttcagcttacccacccacagtgaccagtgtggtggagccgctgacatctcaaggatctatttgggaaggtgagaagagtactcattccatctgggggtgttgttccagccacatcagcctacctggtgggatgtgggggtgtctgccaccctgtcccccctctgctgatgtccctcccctcaggctgtccaggtgccacctgacacaggctgctgtgcaaagacaggcggggaagcccaaacctcactcccagggaggccctcagccgccagagtccaggttctccagaggctacgatttgaggaggttgagggggaagacaggagggaaagaaaagtcctacaactgtcaggaatggggcacctttccctgtccctaagcaaagctccctcttcccactgccctccccagccccagctccctgtcctccccaacacctagtgagaaagacggtgcgtggaagggagtcccatgggcagatgcttacacgacctctttgtgaagcctcttctgggtttaacttcattcatcaatttattcttatgtcaaagcaatgaaacttttctttctggagccagataccaatacaacaggtgaacgggtttctgccacatctctacattgacgggggatgcttgaacaacccccctcactacacagacacacaccgttaaggcacaagggctggggttgagctctagatgagggactttcctgctcctgcaagggtgagcactgtatacacagacaaggagggtgcagtagagtgactcccttggatggaagtagtaccatcagaacctactattattatgacataaattctatttacatacattgagagaatactacaatcaacactttttcctgggatgactttaagaggtttgagccacagcacctgaagtggcaaagatccatggtctttgtagggtattagagaactcttccagtcacctctgaaagcactctagatcttgcagctgagtggatgaagtgtaacaaatctgttgcacgctgagaggagtcagaattagcatttttcatgaaagttccccacgtctctactaagaatgaggaagaaaagactaagactaggtaattacacagaggcttgaaatgttacatcaccagagccaagtcctctcccttcagatcagttactggctgctacacagggacacccccaccttttcagggcatcccatgcactccacttctcaggatctaaggaatttgactttgtagggatcccagaaagggcactgtgccacttcccctggtgtgaatcagacatacattgtacattcatttctaaaattcactcatgcacctcaaaccaaggtcattatccaaaaaaaaaaaaaaaaagctctgggtggaagagtttgtaagttttaagagagggtcatttctatgtgaggaaatgcagaaatggacagaatgattcttattcactgtttgggtctggagaattcccattgtggaaatcttagagatctcaagtttattaccaagggaataaggaaaaaaaggtgagcaggcaccaggccaagcagtggctcccttgccaaggaacctgaggctgcaggtttcagggacccccttgaagaaacctctcctggccattggccaggagaaaagagaagtctctcctgtagagtcacaagagaagcaaaagagggtgggtcactgggtcctggacatagcccccaaccccaagacttcccaatatggagaaactacaccaatgtttaaaaggggaaaaggaaagaacttgtacatcaagggaagatgatttgtaaacacacagtcctgtgcagaaagatccccttcaggaggtgtctccagcatcccaaagctgtgcgcaccttctcttttcctgcctcaggccacctatgcatccagctgcagcccatacccacacctgaaatccatctcttgaatcccagccaggttatataccaccccattgccatgtcctgtcctggccagaatgcatgctgttcccccaagcctcgtgggagtgaggccatgggaaacagagatgagcatgtctggacaagtctgtgatggtagtggatgagaataacccatggcaaaacacgcacattcattaagaaatagggcgacagattccccgttggtgaagcactgaaaggtctattactctcataatattgctgttttattttaatccaccagagctaccatgcaaaactttcctcctgtgaaacgctccagataaagctcctctaatctccccttccctcatgtcctccagctcaaacccaccttcatcccccaaaccaatctgtatcatgcctgttatcagagaggcacagaaagatgggcagtgcctccgttgtcaccattccccacacccctacacacccccacaccctcccctccaggctccacgacttcacagtcttactgttgtaaatatcattgtacagtttgtaatcctcaaataatcccattgtcagaggcctcgcctgatgggccttctcaccctcgagaaaggccagggaatctagaaggggcaacccttcaaggagagcttcagggtcatctctgtgtgagacactattgtatattcctgtaagattgcatttttatctaaggaatgatgttatttaaaaaacaaacaaaaaacacaaaaaataagaattgcaaataaatttcttaacaatgtctacattgacttcattgtatcttccctcttccttatttcttcctttctcctgtttcctagaggtcacaaatacaaacttcactcagttatctcaactgtctgggatccccaaaaggaagaagactggagagaacacaggaaatatgaatccaatgataatacctaagtccattcagcagttaacccatcccctatttcttccttctcatgaaagagttgacagaaaaatggccaaaagttaaaaaggagacaaaatcagaggaattaaatggctaattcacatggattagacaggaaaagcagtctctgaaattggttttgaaaggacagaagggaagagggatggaatgtaggagagaagaaaggagggggagatatgataatatataaagtactatgaggactatacaaatgtaagattgcttttctttttttttgttattataacttaatctgatttcgataaacctttcagaataaccccttaagtaaaaataatttgtcccagaggattctgggaagatggcagagtaaggagcaccaagaatcctccccgatagacaacaaatacactggcagaatctgttttgtttaactattaatattttgaaactctggagtctaatgaaggtttgcaactttcagggggaggcttggacagtaaatcaaggttgattttggtcaatttcagctcttagtacagtagcagctaacccactctcctcccctagcccactttctactcctggaagggtgagcactgcatagacaggcatgaagagataaccagtgtgacttccttgggtggaaatagtaccagcagaacctattattattatgagaaagtactatttatctcataatacaggcagctgagcacttgtccaatagcaccttgcacacagcgtgtagaggccagagtgggctaaaaatatcctgttcttcaaatttcagggatctttgttcaggatacttattgctgcttctaatcacagaggtgcaaacacagaggtgggcagctacttttgttgcacctctccccactgctgcaagcccctccaccactagctgaagtgattccagataatttgaagaaccagcacccttcttcccccttcacttttctctttttccttctttgggagacagacattaaagactaagacactcaaaagcaactgcatatacaaggaaaattagaaagtgactgcacataccctgggaaagaaacaggctcagaaaacacctaagaagacctgaagtttacacctcatgccgatgcttgagtggcctaaaaaagacaaaaacaccaccaccaaaccctaaggaaggaggaaactctgattttcagggttatcacattcttagattcaaatgtccagttttcaacaaaaagtcacaaggcaaagaaagaaacaggaaagtgtggcccattcgaaggaaaaataaataaattaacaggaactgctcctagaaaagacctgatggcagatctactcgacaaagagtttaaaacaactctcttaaagatgtttaaaaaaaaaaaactaggggaggagccaagatggccgaataggaacagctctggtctacagctcccagcatgagcgacgcagaagacgggtgatttctgcatttccaactgaggtaccaggttcatctcactgggaagtgccagacagtaggtgcaggacagtgggtgcagcgcaccctgcgcaagccaaagcagggcgaggcatcgcctcacctgggaagcgcaacgggtcagggaattccctttcctagtcaaagaaaggggtgacagacggcacctggaaaatcaggtcactcccaccctaatactgcgcttttccatggggcttaaaaaacggcgcaccaggagattatatcccgcacctggctcagagggtcctacgcccacggagtctcgctcattgctagcacagcagtccgagatcaaactgcaaggtggcagcgaggctggtggaggggcacccgccat

SEQ ID NO: 2 - DNA, 2360 bp, Homo sapiens
  ref <308>: DATABASE ACCESSION NUMBER: NCBI / rs1006737
  ref <309>: DATABASE ENTRY DATE: 2014-05-14
  ref <313>: RELEVANT RESIDUES IN SEQ ID NO: (1)..(2360)
cttcagcaaagattctcttgcttgactttcctccacctacaagtcaagttggatctgggttcagcttcaagggggtcgaaagtgaggtcagttaaggtcatttggatgggcatgatccttactcccaggtccacccttcccacttgatttaatacaatctggcattattccaacacttctccctttggctgtttattagcatttcctttaactttttgagcataaatggaataagaatcactttcacggcccagaaaggtgtctccagcaaggagtgttctgctggacgatgcagccttttcaaacgagtcagttagctggaagtgtcccgtgtctccttttcttttggaaaagatgggagtgctgaaaactcatgctgaggctggttctctgtttctattggttcctttctggcatgtgttaaattatgtcttttgtgttctgaacaaatatgtgttctcagcatgcaaaatatgcacacaatggctgaccgattgcctgttcttgagaggaagggaacactcaagctgtggtgagttgattgccaggcactctgtggtcaaaaatgtgagggcaccatgggtcacctgcatgtgccttgaaaagtaatgtagggtctaggcacctgagcatctgttcgtcaggtgtgccgaagatactgccagagatgggctcctgtatgcaggctcctcaacagcctggagcgttcgccccagctttgagcctggtgtagggccaggggccagattgtggaaatgagtctttagtgcctccctccatttttatgttggtgtttttcacaaaaattttctgtgtgtgtgtgtgtattttaatatatgaaatccggtttagagaacagcctcgtatgtcccatcctgcttgtaatgcagtgatctgcccttgagaattttaaattagctgacctacatagcttaactatttcaattaaaagtaacaggcagtatagattggcaagaggtggaggagagggaggggaagatccctcccaggagctttggttcagacaaaacaatagaagtgacgagcgattctgggaagaaggcatgactgatagttgtcatggaagctctgacaccctttccatgggtgaggttctcacaaaggtggcttctggatatccgcctgctatgaacacatagcctttgtgggatggtgccaagcaaactctcttcaagggaaggattcaggcagcattattccttgctcttctgcacatccgctcttccatttccagtgtctctatacgtggctctctgagggccagtgttctcccagccccttcggcctgctcccgggggaatacctggagagtaaacactgtctgtggtacaggggggccattcttcctccctttccatttcttctctactgttcagaattctgattccacagaaatgcctaattaactcagttgctctgcaatgacaagctaacatctggagctaccaagtcaggaaagccattcagccggggtccaacacagattttctcccctctgcacccagctcagctgctgggcactgcaccaaccctgatgtggcaggacgaggatgccaagggctggagcaacccaaggctaattttttttcacccagaaaatcatgggttagatatttttaaattgctggcttattttgcagcatttttattatttctggtagatgaggagatcttgccatcactaggggtccatctctcccacatgctgccttgcagtgcttctctacgtagaccatctctgggtgatgccggtttacccagggatgggatggggtgcagtgtattacgcttcaggttgtatttgtggcccccttgggaatcagttgcaaagcagggccgtgtctgatgtgatggccaggacaaaggtctgaatgactaacaaagaagctgtctctggcaggcaggtaggagcagtccggtgcaccagagctgtggaatgactcccaggttccatttttcacttccactttgcatccatcctcccatctgcctgcccactgtgtacagtgcttactacatgccttacctagtctaagtgctttacataaatgaattcatttgacgttcacaggacatcacagataggcattaccattgtccctgttttataaatgagaatactgaatcattgaaaggttaataattttgcttatggacatttgcttctggagctggaccaggcagtttggcttcagagtccacttggctctatcaaagtcttgctatcaattacataagttccattccatctcagcccgaartgttttcagagccggagacctcacagtgtctctcaggacagtacctttcaggtttgaatgtgcccaagagccatctgg

SEQ ID NO: 3 - DNA, 2360 bp, Homo sapiens
cttcagcaaagattctcttgcttgactttcctccacctacaagtcaagttggatctgggttcagcttcaagggggtcgaaagtgaggtcagttaaggtcatttggatgggcatgatccttactcccaggtccacccttcccacttgatttaatacaatctggcattattccaacacttctccctttggctgtttattagcatttcctttaactttttgagcataaatggaataagaatcactttcacggcccagaaaggtgtctccagcaaggagtgttctgctggacgatgcagccttttcaaacgagtcagttagctggaagtgtcccgtgtctccttttcttttggaaaagatgggagtgctgaaaactcatgctgaggctggttctctgtttctattggttcctttctggcatgtgttaaattatgtcttttgtgttctgaacaaatatgtgttctcagcatgcaaaatatgcacacaatggctgaccgattgcctgttcttgagaggaagggaacactcaagctgtggtgagttgattgccaggcactctgtggtcaaaaatgtgagggcaccatgggtcacctgcatgtgccttgaaaagtaatgtagggtctaggcacctgagcatctgttcgtcaggtgtgccgaagatactgccagagatgggctcctgtatgcaggctcctcaacagcctggagcgttcgccccagctttgagcctggtgtagggccaggggccagattgtggaaatgagtctttagtgcctccctccatttttatgttggtgtttttcacaaaaattttctgtgtgtgtgtgtgtattttaatatatgaaatccggtttagagaacagcctcgtatgtcccatcctgcttgtaatgcagtgatctgcccttgagaattttaaattagctgacctacatagcttaactatttcaattaaaagtaacaggcagtatagattggcaagaggtggaggagagggaggggaagatccctcccaggagctttggttcagacaaaacaatagaagtgacgagcgattctgggaagaaggcatgactgatagttgtcatggaagctctgacaccctttccatgggtgaggttctcacaaaggtggcttctggatatccgcctgctatgaacacatagcctttgtgggatggtgccaagcaaactctcttcaagggaaggattcaggcagcattattccttgctcttctgcacatccgctcttccatttccagtgtctctatacgtggctctctgagggccagtgttctcccagccccttcggcctgctcccgggggaatacctggagagtaaacactgtctgtggtacaggggggccattcttcctccctttccatttcttctctactgttcagaattctgattccacagaaatgcctaattaactcagttgctctgcaatgacaagctaacatctggagctaccaagtcaggaaagccattcagccggggtccaacacagattttctcccctctgcacccagctcagctgctgggcactgcaccaaccctgatgtggcaggacgaggatgccaagggctggagcaacccaaggctaattttttttcacccagaaaatcatgggttagatatttttaaattgctggcttattttgcagcatttttattatttctggtagatgaggagatcttgccatcactaggggtccatctctcccacatgctgccttgcagtgcttctctacgtagaccatctctgggtgatgccggtttacccagggatgggatggggtgcagtgtattacgcttcaggttgtatttgtggcccccttgggaatcagttgcaaagcagggccgtgtctgatgtgatggccaggacaaaggtctgaatgactaacaaagaagctgtctctggcaggcaggtaggagcagtccggtgcaccagagctgtggaatgactcccaggttccatttttcacttccactttgcatccatcctcccatctgcctgcccactgtgtacagtgcttactacatgccttacctagtctaagtgctttacataaatgaattcatttgacgttcacaggacatcacagataggcattaccattgtccctgttttataaatgagaatactgaatcattgaaaggttaataattttgcttatggacatttgcttctggagctggaccaggcagtttggcttcagagtccacttggctctatcaaagtcttgctatcaattacataagttccattccatctcagcccgaaatgttttcagagccggagacctcacagtgtctctcaggacagtacctttcaggtttgaatgtgcccaagagccatctgg

SEQ ID NO: 4 - DNA, 13480 bp, Homo sapiens
  ref <308>: DATABASE ACCESSION NUMBER: NCBI / NM_000719.6
  ref <309>: DATABASE ENTRY DATE: 2014-05-14
  ref <313>: RELEVANT RESIDUES IN SEQ ID NO: (1)..(13480)
ttattttttcaaatggtgtagccgccggaggtgcggtgctcagttcttggaaggggcccggatgtactgaggatgcgttacagtttcactcgaggaggcagtagtggaaaggagcagtttttggggtttgatgccataatgggaatcaggtaatcgtcggcggggaagaagaaacgctgcagaccacggcttcctcgaatcttgcgcgaaagccgccggcctcggaggagggattaatccagacccgccggggggtgttttcacatttcttcctcttcgtggctgctcctcctattaaaaccatttttggtccatggtcaatgagaatacgaggatgtacattccagaggaaaaccaccaaggttccaactatgggagcccacgccccgcccatgccaacatgaatgccaatgcggcagcggggctggcccctgagcacatccccaccccgggggctgccctgtcgtggcaggcggccatcgacgcagcccggcaggctaagctgatgggcagcgctggcaatgcgaccatctccacagtcagctccacgcagcggaagcggcagcaatatgggaaacccaagaagcagggcagcaccacggccacacgcccgccccgagccctgctctgcctgaccctgaagaaccccatccggagggcctgcatcagcattgtcgaatggaaaccatttgaaataattattttactgactatttttgccaattgtgtggccttagcgatctatattccctttccagaagatgattccaacgccaccaattccaacctggaacgagtggaatatctctttctcataatttttacggtggaagcgtttttaaaagtaatcgcctatggactcctctttcaccccaatgcctacctccgcaacggctggaacctactagattttataattgtggttgtggggctttttagtgcaattttagaacaagcaaccaaagcagatggggcaaacgctctcggagggaaaggggccggatttgatgtgaaggcgctgagggccttccgcgtgctgcgccccctgcggctggtgtccggagtcccaagtctccaggtggtcctgaattccatcatcaaggccatggtccccctgctgcacatcgccctgcttgtgctgtttgtcatcatcatctacgccatcatcggcttggagctcttcatggggaagatgcacaagacctgctacaaccaggagggcatagcagatgttccagcagaagatgacccttccccttgtgcgctggaaacgggccacgggcggcagtgccagaacggcacggtgtgcaagcccggctgggatggtcccaagcacggcatcaccaactttgacaactttgccttcgccatgctcacggtgttccagtgcatcaccatggagggctggacggacgtgctgtactgggtcaatgatgccgtaggaagggactggccctggatctattttgttacactaatcatcatagggtcattttttgtacttaacttggttctcggtgtgcttagcggagagttttccaaagagagggagaaggccaaggcccggggagatttccagaagctgcgggagaagcagcagctagaagaggatctcaaaggctacctggattggatcactcaggccgaagacatcgatcctgagaatgaggacgaaggcatggatgaggagaagccccgaaacatgagcatgcccaccagtgagaccgagtccgtcaacaccgaaaacgtggctggaggtgacatcgagggagaaaactgcggggccaggctggcccaccggatctccaagtcaaagttcagccgctactggcgccggtggaatcggttctgcagaaggaagtgccgcgccgcagtcaagtctaatgtcttctactggctggtgattttcctggtgttcctcaacacgctcaccattgcctctgagcactacaaccagcccaactggctcacagaagtccaagacacggcaaacaaggccctgctggccctgttcacggcagagatgctcctgaagatgtacagcctgggcctgcaggcctacttcgtgtccctcttcaaccgctttgactgcttcgtcgtgtgtggcggcatcctggagaccatcctggtggagaccaagatcatgtccccactgggcatctccgtgctcagatgcgtccggctgctgaggattttcaagatcacgaggtactggaactccttgagcaacctggtggcatccttgctgaactctgtgcgctccatcgcctccctgctccttctcctcttcctcttcatcatcatcttctccctcctggggatgcagctctttggaggaaagttcaactttgatgagatgcagacccggaggagcacattcgataacttcccccagtccctcctcactgtgtttcagatcctgaccggggaggactggaattcggtgatgtatgatgggatcatggcttatggcggcccctcttttccagggatgttagtctgtatttacttcatcatcctcttcatctgtggaaactatatcctactgaatgtgttcttggccattgctgtggacaacctggctgatgctgagagcctcacatctgcccaaaaggaggaggaagaggagaaggagagaaagaagctggccaggactgccagcccagagaagaaacaagagttggtggagaagccggcagtgggggaatccaaggaggagaagattgagctgaaatccatcacggctgacggagagtctccacccgccaccaagatcaacatggatgacctccagcccaatgaaaatgaggataagagcccctaccccaacccagaaactacaggagaagaggatgaggaggagccagagatgcctgtcggccctcgcccacgaccactctctgagcttcaccttaaggaaaaggcagtgcccatgccagaagccagcgcgtttttcatcttcagctctaacaacaggtttcgcctccagtgccaccgcattgtcaatgacacgatcttcaccaacctgatcctcttcttcattctgctcagcagcatttccctggctgctgaggacccggtccagcacacctccttcaggaaccatattctgttttattttgatattgtttttaccaccattttcaccattgaaattgctctgaagatgactgcttatggggctttcttgcacaagggttctttctgccggaactacttcaacatcctggacctgctggtggtcagcgtgtccctcatctcctttggcatccagtccagtgcaatcaatgtcgtgaagatcttgcgagtcctgcgagtactcaggcccctgagggccatcaacagggccaaggggctaaagcatgtggttcagtgtgtgtttgtcgccatccggaccatcgggaacatcgtgattgtcaccaccctgctgcagttcatgtttgcctgcatcggggtccagctcttcaagggaaagctgtacacctgttcagacagttccaagcagacagaggcggaatgcaagggcaactacatcacgtacaaagacggggaggttgaccaccccatcatccaaccccgcagctgggagaacagcaagtttgactttgacaatgttctggcagccatgatggccctcttcaccgtctccaccttcgaagggtggccagagctgctgtaccgctccatcgactcccacacggaagacaagggccccatctacaactaccgtgtggagatctccatcttcttcatcatctacatcatcatcatcgccttcttcatgatgaacatcttcgtgggcttcgtcatcgtcacctttcaggagcagggggagcaggagtacaagaactgtgagctggacaagaaccagcgacagtgcgtggaatacgccctcaaggcccggcccctgcggaggtacatccccaagaaccagcaccagtacaaagtgtggtacgtggtcaactccacctacttcgagtacctgatgttcgtcctcatcctgctcaacaccatctgcctggccatgcagcactacggccagagctgcctgttcaaaatcgccatgaacatcctcaacatgctcttcactggcctcttcaccgtggagatgatcctgaagctcattgccttcaaacccaagcactatttctgtgatgcatggaatacatttgacgccttgattgttgtgggtagcattgttgatatagcaatcaccgaggtaaacccagctgaacatacccaatgctctccctctatgaacgcagaggaaaactcccgcatctccatcaccttcttccgcctgttccgggtcatgcgtctggtgaagctgctgagccgtggggagggcatccggacgctgctgtggaccttcatcaagtccttccaggccctgccctatgtggccctcctgatcgtgatgctgttcttcatctacgcggtgatcgggatgcaggtgtttgggaaaattgccctgaatgataccacagagatcaaccggaacaacaactttcagaccttcccccaggccgtgctgctcctcttcaggtgtgccaccggggaggcctggcaggacatcatgctggcctgcatgccaggcaagaagtgtgccccagagtccgagcccagcaacagcacggagggtgaaacaccctgtggtagcagctttgctgtcttctacttcatcagcttctacatgctctgtgccttcctgatcatcaacctctttgtagctgtcatcatggacaactttgactacctgacaagggactggtccatccttggtccccaccacctggatgagtttaaaagaatctgggcagagtatgaccctgaagccaagggtcgtatcaaacacctggatgtggtgaccctcctccggcggattcagccgccactaggttttgggaagctgtgccctcaccgcgtggcttgcaaacgcctggtctccatgaacatgcctctgaacagcgacgggacagtcatgttcaatgccaccctgtttgccctggtcaggacggccctgaggatcaaaacagaagggaacctagaacaagccaatgaggagctgcgggcgatcatcaagaagatctggaagcggaccagcatgaagctgctggaccaggtggtgccccctgcaggtgatgatgaggtcaccgttggcaagttctacgccacgttcctgatccaggagtacttccggaagttcaagaagcgcaaagagcagggccttgtgggcaagccctcccagaggaacgcgctgtctctgcaggctggcttgcgcacactgcatgacatcgggcctgagatccgacgggccatctctggagatctcaccgctgaggaggagctggacaaggccatgaaggaggctgtgtccgctgcttctgaagatgacatcttcaggagggccggtggcctgttcggcaaccacgtcagctactaccaaagcgacggccggagcgccttcccccagaccttcaccactcagcgcccgctgcacatcaacaaggcgggcagcagccagggcgacactgagtcgccatcccacgagaagctggtggactccaccttcaccccgagcagctactcgtccaccggctccaacgccaacatcaacaacgccaacaacaccgccctgggtcgcctccctcgccccgccggctaccccagcacggtcagcactgtggagggccacgggccccccttgtcccctgccatccgggtgcaggaggtggcgtggaagctcagctccaacaggtgccactcccgggagagccaggcagccatggcgggtcaggaggagacgtctcaggatgagacctatgaagtgaagatgaaccatgacacggaggcctgcagtgagcccagcctgctctccacagagatgctctcctaccaggatgacgaaaatcggcaactgacgctcccagaggaggacaagagggacatccggcaatctccgaagaggggtttcctccgctctgcctcactaggtcgaagggcctccttccacctggaatgtctgaagcgacagaaggaccgagggggagacatctctcagaagacagtcctgcccttgcatctggttcatcatcaggcattggcagtggcaggcctgagccccctcctccagagaagccattcccctgcctcattccctaggccttttgccaccccaccagccacacctggcagccgaggctggcccccacagcccgtccccaccctgcggcttgagggggtcgagtccagtgagaaactcaacagcagcttcccatccatccactgcggctcctgggctgagaccacccccggtggcgggggcagcagcgccgcccggagagtccggcccgtctccctcatggtgcccagccaggctggggccccagggaggcagttccacggcagtgccagcagcctggtggaagcggtcttgatttcagaaggactggggcagtttgctcaagatcccaagttcatcgaggtcaccacccaggagctggccgacgcctgcgacatgaccatagaggagatggagagcgcggccgacaacatcctcagcgggggcgccccacagagccccaatggcgccctcttaccctttgtgaactgcagggacgcggggcaggaccgagccgggggcgaagaggacgcgggctgtgtgcgcgcgcggggtcgaccgagtgaggaggagctccaggacagcagggtctacgtcagcagcctgtagtgggcgctgccagatgcgggcttttttttatttgtttcaatgttcctaatgggttcgtttcagaagtgcctcactgttctcgtgacctggagttaaccggaacagcgtcttcattcatttctgttgggaccagacgcggagcctgggtgcgcgagccgccctccgggaggaaggcgcccggctgcgtctgcagaggcggggagaggaggcggcgagggtcccggggcgcgaggaaggcgcctgccctctcccagctcgcaggccccgggcccggccgcgcctccgcggggagagcaccccggcttcccgcgcgccctcaccaaaaggaccctacagcaaacgggtgtctttcgactctgcttgtagaaaccatttgcacatattctgtacgagcctcgctgtctccctagagccagggccctgcggatttggagaagggagcggggcaggacttccaggaggaccccaacccggcccggagagggaggaggaggcctccaggggcgcggagctctggggatgggcgtcgggccggcagtggtgcggctcactccgtccctgcccacctgcgacgggatcccccgaccggcacgggccacgccgagctcccggccagccgccggcccgcaggcagcgcgagggaggagctgcgccgccggctccgcccaaccaggtggtgctgagcttccgctgagcgctcttttgttttgtggtttgacacttttcttgacagcatgttgcagtttcttttcggttttggttttttttaaatgttttattttgctttcccagcgggaggggaggaagaagagtgtttacaaagtcctgtagccccctcacctttctgttttcacttttgccaatgtacatcgggtttggttttcttgtattatttaaacggttgtggtttcctttttccacggaggttcaatagaagccgctgcaggagagttttaccaaccattgtgtatgcccaataatttgttatcatttccttaggtagtaacctatttttgttctggtttggttcggttatctaatggaaaggtaactggcaatgcacttgatgtggtcttgcacatgtgggtgatagagttgggttcctttttatgctgggtgtacaggtgggtttgggagagaggagcatgcgcgagagagtctccgagtgtgtgcgacgcgtgtgtgtgtggtgggttgtctgtgtgcatatgtcctgcccgtgtatatgcacccacaccatgtgcccgtgcacaccagtgactacgcagtcccccctttctggtttagctgtgggaagatctgaatctggggccgtttgaaagcaaaaacaaaccactgtctctgcttctgaaacgggaatcagtaactctttgcattttctgtcccacaagatatgcaaaaacaatgcaataatattcatttaaaaatacaattgtgagttgtgttggcattaaaactgtattttaaaaaaagacagaaatttaagggaaaaacacaagaaggcattttgcttcaatatattccgtgtaatgttttattgcattgataatgtttctgttgaagaaaccgttatacttgaattcaggtcagtttcagtatttttcaaatatttttttaaaactgaattgcaattgtgccaagcgaatataatgaattgaattaagttggttttcggattcacttcttgtatattttgctgcatgtaaagtaaatcattttgtatttggagtgtgacaagctttacctttgaactcaagtgcttttctatatgtggttgggggaaagggaacaagttttctttagtttgcacaatgagcaaaggtatcaccagtgtagtcattattctgctctccacaaacaggtttggacattactgttttgcatatcttgtgtttgcttacatttccctcaatttttccaaaatcgtttgctgggtatgtttgtaccgcctcttgctgtgagagaccaggacctattttattccagtcttcactctgtccactctgctctggtcatctgatttggtacttctccaagaacagcccttcactgtgaggtgcagggaggcgttctgatgagccctcagtcactgggccgtcatccgcatcccccatggaagaggtagctggctttcccttcccttccaccacacggaattttctctttggcttccttaggaaagtgtacactaaccgggaggataaaattaaagtcaggctgcttggagggaggggcatcctcacttccggattcttgttgctctacccaacaaggacagcaggggctcgagaaaggaactggtgaaaccctgatccatctgaaagtcaactctgcgtgctcctttctccatcccttcctcactctggagcagcctttccttcaggcttgccctaatgtttgggctgccggggagggggccaggacaagggaagaggcatccggagctcacagtgggggtgggaacagatttttgtgggggcatctctaatgctcacttatatctccctagaacatcactcttttggtgctgtgtccttcaaatgtatgtcaacagtggtggctgaaaagggactgctttggggaaaacaggacccaaccattcacccagaattgacccattaaatctcttccagtcctagtgttccctgagcccctcttggcacatatataagtaagctagaaattacaataagggacagtccattcctctatgacagcttgctggactgattcatgacaaagtggagaaatgtactcaatactccccggttaacacagtctagaaacagagtttctttatggatatccacacccaagtcatccaaactttcttgattccttttcactgccatcaaggtcctctagaaattgagtttaggtatcatcctttgaaaagttcccaagatttctaccaggaggtacacacaggcgttccctgtctagggcaggaggactatcctagcttgaccttctgatccactagaataagactggcgtatgatgcctgtcatcagaacagactggcacaagtagtgacatcaatgaaccacagcacaatcttccaagtgatgtctactctccacctaaaatggaattttccccatgaccttgtaaaacataattgtcacatcttccatacccctcctgacagcccccaagtgtcaggagaaaacagtcaggggctaagggcccaagggacttgaagaaacaacagtttaaggtctgcagtttggtcaacttaattcttgtcctccgaccagccctgcctctttcatttccagaccttggagaatttttcccagctttgattcagaaggtactagttataacccctttccttcttcttaatccaataggcctcactctcactgggaaatccactcaaaggaacaaggcaatgtctctcattctatttcccagttccaaattccaggtgcttgtctggagtgaagctacccgttactttctcccagcttttctccacccagcatgtctcctgcccatgcagctgaagacagtggggcaacctcaggagaagcagacctttccatgcccaagttcatctcctgagcaacagtgacacctagaaaatgaggactttggaagtcacccaaaagatggtggctactttatggagtcctgaagatacacagccaccactcctaaaggcaaagaaagaaaacacgaatgtaggtcagggatagagtggaaccctggtcatcggggtttttagcctcatcgtgggaaaggtggtaaaggaggatgatggcatctccatccctagaggccaagaattgaaatatcattgtcaaggattagaaacaattcagcaaagaggccacaaaaagggcctgctgactcccagaagacctctttaaaccccaggggaggcaaatacttgctgatggagtctgggccgtttccatattttaaagaagacctgcctctggggcaaatgtcagcacagagaggactgggaggagaatggaggcaagaaaagggcatattttgactccctctgtgcctcttcccagttcatggaaggatgtgttcagcttacccacccacagtgaccagtgtggtggagccgctgacatctcaaggatctatttgggaaggtgagaagagtactcattccatctgggggtgttgttccagccacatcagcctacctggtgggatgtgggggtgtctgccaccctgtcccccctctgctgatgtccctcccctcaggctgtccaggtgccacctgacacaggctgctgtgcaaagacaggcggggaagcccaaacctcactcccagggaggccctcagccgccagagtccaggttctccagaggctacgatttgaggaggttgagggggaagacaggagggaaagaaaagtcctacaactgtcaggaatggggcacctttccctgtccctaagcaaagctccctcttcccactgccctccccagccccagctccctgtcctccccaacacctagtgagaaagacggtgcgtggaagggagtcccatgggcagatgcttacacgacctctttgtgaagcctcttctgggtttaacttcattcatcaatttattcttatgtcaaagcaatgaaacttttctttctggagccagataccaatacaacaggtgaacgggtttctgccacatctctacattgacgggggatgcttgaacaacccccctcactacacagacacacaccgttaaggcacaagggctggggttgagctctagatgagggactttcctgctcctgcaagggtgagcactgtatacacagacaaggagggtgcagtagagtgactcccttggatggaagtagtaccatcagaacctactattattatgacataaattctatttacatacattgagagaatactacaatcaacactttttcctgggatgactttaagaggtttgagccacagcacctgaagtggcaaagatccatggtctttgtagggtattagagaactcttccagtcacctctgaaagcactctagatcttgcagctgagtggatgaagtgtaacaaatctgttgcacgctgagaggagtcagaattagcatttttcatgaaagttccccacgtctctactaagaatgaggaagaaaagactaagactaggtaattacacagaggcttgaaatgttacatcaccagagccaagtcctctcccttcagatcagttactggctgctacacagggacacccccaccttttcagggcatcccatgcactccacttctcaggatctaaggaatttgactttgtagggatcccagaaagggcactgtgccacttcccctggtgtgaatcagacatacattgtacattcatttctaaaattcactcatgcacctcaaaccaaggtcattatccaaaaaaaaaaaaaaaaagctctgggtggaagagtttgtaagttttaagagagggtcatttctatgtgaggaaatgcagaaatggacagaatgattcttattcactgtttgggtctggagaattcccattgtggaaatcttagagatctcaagtttattaccaagggaataaggaaaaaaaggtgagcaggcaccaggccaagcagtggctcccttgccaaggaacctgaggctgcaggtttcagggacccccttgaagaaacctctcctggccattggccaggagaaaagagaagtctctcctgtagagtcacaagagaagcaaaagagggtgggtcactgggtcctggacatagcccccaaccccaagacttcccaatatggagaaactacaccaatgtttaaaaggggaaaaggaaagaacttgtacatcaagggaagatgatttgtaaacacacagtcctgtgcagaaagatccccttcaggaggtgtctccagcatcccaaagctgtgcgcaccttctcttttcctgcctcaggccacctatgcatccagctgcagcccatacccacacctgaaatccatctcttgaatcccagccaggttatataccaccccattgccatgtcctgtcctggccagaatgcatgctgttcccccaagcctcgtgggagtgaggccatgggaaacagagatgagcatgtctggacaagtctgtgatggtagtggatgagaataacccatggcaaaacacgcacattcattaagaaatagggcgacagattccccgttggtgaagcactgaaaggtctattactctcataatattgctgttttattttaatccaccagagctaccatgcaaaactttcctcctgtgaaacgctccagataaagctcctctaatctccccttccctcatgtcctccagctcaaacccaccttcatcccccaaaccaatctgtatcatgcctgttatcagagaggcacagaaagatgggcagtgcctccgttgtcaccattccccacacccctacacacccccacaccctcccctccaggctccacgacttcacagtcttactgttgtaaatatcattgtacagtttgtaatcctcaaataatcccattgtcagaggcctcgcctgatgggccttctcaccctcgagaaaggccagggaatctagaaggggcaacccttcaaggagagcttcagggtcatctctgtgtgagacactattgtatattcctgtaagattgcatttttatctaaggaatgatgttatttaaaaaacaaacaaaaaacacaaaaaataagaattgcaaataaatttcttaacaatgtct

SEQ ID NO: 5 - protein, 2138 aa, Homo sapiens
  ref <308>: DATABASE ACCESSION NUMBER: NCBI / NP_000710.5
  ref <309>: DATABASE ENTRY DATE: 2014-05-14
  ref <313>: RELEVANT RESIDUES IN SEQ ID NO: (1)..(2138)
MVNENTRMYIPEENHQGSNYGSPRPAHANMNANAAAGLAPEHIPTPGAALSWQAAIDAARQAKLMGSAGNATISTVSSTQRKRQQYGKPKKQGSTTATRPPRALLCLTLKNPIRRACISIVEWKPFEIIILLTIFANCVALAIYIPFPEDDSNATNSNLERVEYLFLIIFTVEAFLKVIAYGLLFHPNAYLRNGWNLLDFIIVVVGLFSAILEQATKADGANALGGKGAGFDVKALRAFRVLRPLRLVSGVPSLQVVLNSIIKAMVPLLHIALLVLFVIIIYAIIGLELFMGKMHKTCYNQEGIADVPAEDDPSPCALETGHGRQCQNGTVCKPGWDGPKHGITNFDNFAFAMLTVFQCITMEGWTDVLYWVNDAVGRDWPWIYFVTLIIIGSFFVLNLVLGVLSGEFSKEREKAKARGDFQKLREKQQLEEDLKGYLDWITQAEDIDPENEDEGMDEEKPRNMSMPTSETESVNTENVAGGDIEGENCGARLAHRISKSKFSRYWRRWNRFCRRKCRAAVKSNVFYWLVIFLVFLNTLTIASEHYNQPNWLTEVQDTANKALLALFTAEMLLKMYSLGLQAYFVSLFNRFDCFVVCGGILETILVETKIMSPLGISVLRCVRLLRIFKITRYWNSLSNLVASLLNSVRSIASLLLLLFLFIIIFSLLGMQLFGGKFNFDEMQTRRSTFDNFPQSLLTVFQILTGEDWNSVMYDGIMAYGGPSFPGMLVCIYFIILFICGNYILLNVFLAIAVDNLADAESLTSAQKEEEEEKERKKLARTASPEKKQELVEKPAVGESKEEKIELKSITADGESPPATKINMDDLQPNENEDKSPYPNPETTGEEDEEEPEMPVGPRPRPLSELHLKEKAVPMPEASAFFIFSSNNRFRLQCHRIVNDTIFTNLILFFILLSSISLAAEDPVQHTSFRNHILFYFDIVFTTIFTIEIALKMTAYGAFLHKGSFCRNYFNILDLLVVSVSLISFGIQSSAINVVKILRVLRVLRPLRAINRAKGLKHVVQCVFVAIRTIGNIVIVTTLLQFMFACIGVQLFKGKLYTCSDSSKQTEAECKGNYITYKDGEVDHPIIQPRSWENSKFDFDNVLAAMMALFTVSTFEGWPELLYRSIDSHTEDKGPIYNYRVEISIFFIIYIIIIAFFMMNIFVGFVIVTFQEQGEQEYKNCELDKNQRQCVEYALKARPLRRYIPKNQHQYKVWYVVNSTYFEYLMFVLILLNTICLAMQHYGQSCLFKIAMNILNMLFTGLFTVEMILKLIAFKPKHYFCDAWNTFDALIVVGSIVDIAITEVNPAEHTQCSPSMNAEENSRISITFFRLFRVMRLVKLLSRGEGIRTLLWTFIKSFQALPYVALLIVMLFFIYAVIGMQVFGKIALNDTTEINRNNNFQTFPQAVLLLFRCATGEAWQDIMLACMPGKKCAPESEPSNSTEGETPCGSSFAVFYFISFYMLCAFLIINLFVAVIMDNFDYLTRDWSILGPHHLDEFKRIWAEYDPEAKGRIKHLDVVTLLRRIQPPLGFGKLCPHRVACKRLVSMNMPLNSDGTVMFNATLFALVRTALRIKTEGNLEQANEELRAIIKKIWKRTSMKLLDQVVPPAGDDEVTVGKFYATFLIQEYFRKFKKRKEQGLVGKPSQRNALSLQAGLRTLHDIGPEIRRAISGDLTAEEELDKAMKEAVSAASEDDIFRRAGGLFGNHVSYYQSDGRSAFPQTFTTQRPLHINKAGSSQGDTESPSHEKLVDSTFTPSSYSSTGSNANINNANNTALGRLPRPAGYPSTVSTVEGHGPPLSPAIRVQEVAWKLSSNRCHSRESQAAMAGQEETSQDETYEVKMNHDTEACSEPSLLSTEMLSYQDDENRQLTLPEEDKRDIRQSPKRGFLRSASLGRRASFHLECLKRQKDRGGDISQKTVLPLHLVHHQALAVAGLSPLLQRSHSPASFPRPFATPPATPGSRGWPPQPVPTLRLEGVESSEKLNSSFPSIHCGSWAETTPGGGGSSAARRVRPVSLMVPSQAGAPGRQFHGSASSLVEAVLISEGLGQFAQDPKFIEVTTQELADACDMTIEEMESAADNILSGGAPQSPNGALLPFVNCRDAGQDRAGGEEDAGCVRARGRPSEEELQDSRVYVSSL

SEQ ID NO: 6 - DNA, 13624 bp, Homo sapiens
  ref <308>: DATABASE ACCESSION NUMBER: NCBI / NM_001129827.1
  ref <309>: DATABASE ENTRY DATE: 2014-05-14
  ref <313>: RELEVANT RESIDUES IN SEQ ID NO: (1)..(13624)
ttattttttcaaatggtgtagccgccggaggtgcggtgctcagttcttggaaggggcccggatgtactgaggatgcgttacagtttcactcgaggaggcagtagtggaaaggagcagtttttggggtttgatgccataatgggaatcaggtaatcgtcggcggggaagaagaaacgctgcagaccacggcttcctcgaatcttgcgcgaaagccgccggcctcggaggagggattaatccagacccgccggggggtgttttcacatttcttcctcttcgtggctgctcctcctattaaaaccatttttggtccatggtcaatgagaatacgaggatgtacattccagaggaaaaccaccaaggttccaactatgggagcccacgccccgcccatgccaacatgaatgccaatgcggcagcggggctggcccctgagcacatccccaccccgggggctgccctgtcgtggcaggcggccatcgacgcagcccggcaggctaagctgatgggcagcgctggcaatgcgaccatctccacagtcagctccacgcagcggaagcggcagcaatatgggaaacccaagaagcagggcagcaccacggccacacgcccgccccgagccctgctctgcctgaccctgaagaaccccatccggagggcctgcatcagcattgtcgaatggaaaccatttgaaataattattttactgactatttttgccaattgtgtggccttagcgatctatattccctttccagaagatgattccaacgccaccaattccaacctggaacgagtggaatatctctttctcataatttttacggtggaagcgtttttaaaagtaatcgcctatggactcctctttcaccccaatgcctacctccgcaacggctggaacctactagattttataattgtggttgtggggctttttagtgcaattttagaacaagcaaccaaagcagatggggcaaacgctctcggagggaaaggggccggatttgatgtgaaggcgctgagggccttccgcgtgctgcgccccctgcggctggtgtccggagtcccaagtctccaggtggtcctgaattccatcatcaaggccatggtccccctgctgcacatcgccctgcttgtgctgtttgtcatcatcatctacgccatcatcggcttggagctcttcatggggaagatgcacaagacctgctacaaccaggagggcatagcagatgttccagcagaagatgacccttccccttgtgcgctggaaacgggccacgggcggcagtgccagaacggcacggtgtgcaagcccggctgggatggtcccaagcacggcatcaccaactttgacaactttgccttcgccatgctcacggtgttccagtgcatcaccatggagggctggacggacgtgctgtactgggtcaatgatgccgtaggaagggactggccctggatctattttgttacactaatcatcatagggtcattttttgtacttaacttggttctcggtgtgcttagcggagagttttccaaagagagggagaaggccaaggcccggggagatttccagaagctgcgggagaagcagcagctagaagaggatctcaaaggctacctggattggatcactcaggccgaagacatcgatcctgagaatgaggacgaaggcatggatgaggagaagccccgaaacatgagcatgcccaccagtgagaccgagtccgtcaacaccgaaaacgtggctggaggtgacatcgagggagaaaactgcggggccaggctggcccaccggatctccaagtcaaagttcagccgctactggcgccggtggaatcggttctgcagaaggaagtgccgcgccgcagtcaagtctaatgtcttctactggctggtgattttcctggtgttcctcaacacgctcaccattgcctctgagcactacaaccagcccaactggctcacagaagtccaagacacggcaaacaaggccctgctggccctgttcacggcagagatgctcctgaagatgtacagcctgggcctgcaggcctacttcgtgtccctcttcaaccgctttgactgcttcgtcgtgtgtggcggcatcctggagaccatcctggtggagaccaagatcatgtccccactgggcatctccgtgctcagatgcgtccggctgctgaggattttcaagatcacgaggtactggaactccttgagcaacctggtggcatccttgctgaactctgtgcgctccatcgcctccctgctccttctcctcttcctcttcatcatcatcttctccctcctggggatgcagctctttggaggaaagttcaactttgatgagatgcagacccggaggagcacattcgataacttcccccagtccctcctcactgtgtttcagatcctgaccggggaggactggaattcggtgatgtatgatgggatcatggcttatggcggcccctcttttccagggatgttagtctgtatttacttcatcatcctcttcatctgtggaaactatatcctactgaatgtgttcttggccattgctgtggacaacctggctgatgctgagagcctcacatctgcccaaaaggaggaggaagaggagaaggagagaaagaagctggccaggactgccagcccagagaagaaacaagagttggtggagaagccggcagtgggggaatccaaggaggagaagattgagctgaaatccatcacggctgacggagagtctccacccgccaccaagatcaacatggatgacctccagcccaatgaaaatgaggataagagcccctaccccaacccagaaactacaggagaagaggatgaggaggagccagagatgcctgtcggccctcgcccacgaccactctctgagcttcaccttaaggaaaaggcagtgcccatgccagaagccagcgcgtttttcatcttcagctctaacaacaggtttcgcctccagtgccaccgcattgtcaatgacacgatcttcaccaacctgatcctcttcttcattctgctcagcagcatttccctggctgctgaggacccggtccagcacacctccttcaggaaccatattctgttttattttgatattgtttttaccaccattttcaccattgaaattgctctgaagatcctaggcaatgcagactatgtcttcactagtatctttacattagaaattatccttaagatgactgcttatggggctttcttgcacaagggttctttctgccggaactacttcaacatcctggacctgctggtggtcagcgtgtccctcatctcctttggcatccagtccagtgcaatcaatgtcgtgaagatcttgcgagtcctgcgagtactcaggcccctgagggccatcaacagggccaaggggctaaagcatgtggttcagtgtgtgtttgtcgccatccggaccatcgggaacatcgtgattgtcaccaccctgctgcagttcatgtttgcctgcatcggggtccagctcttcaagggaaagctgtacacctgttcagacagttccaagcagacagaggcggaatgcaagggcaactacatcacgtacaaagacggggaggttgaccaccccatcatccaaccccgcagctgggagaacagcaagtttgactttgacaatgttctggcagccatgatggccctcttcaccgtctccaccttcgaagggtggccagagctgctgtaccgctccatcgactcccacacggaagacaagggccccatctacaactaccgtgtggagatctccatcttcttcatcatctacatcatcatcatcgccttcttcatgatgaacatcttcgtgggcttcgtcatcgtcacctttcaggagcagggggagcaggagtacaagaactgtgagctggacaagaaccagcgacagtgcgtggaatacgccctcaaggcccggcccctgcggaggtacatccccaagaaccagcaccagtacaaagtgtggtacgtggtcaactccacctacttcgagtacctgatgttcgtcctcatcctgctcaacaccatctgcctggccatgcagcactacggccagagctgcctgttcaaaatcgccatgaacatcctcaacatgctcttcactggcctcttcaccgtggagatgatcctgaagctcattgccttcaaacccaagggttactttagtgatccctggaatgtttttgacttcctcatcgtaattggcagcataattgacgtcattctcagtgagactaatcactatttctgtgatgcatggaatacatttgacgccttgattgttgtgggtagcattgttgatatagcaatcaccgaggtaaacccagctgaacatacccaatgctctccctctatgaacgcagaggaaaactcccgcatctccatcaccttcttccgcctgttccgggtcatgcgtctggtgaagctgctgagccgtggggagggcatccggacgctgctgtggaccttcatcaagtccttccaggccctgccctatgtggccctcctgatcgtgatgctgttcttcatctacgcggtgatcgggatgcaggtgtttgggaaaattgccctgaatgataccacagagatcaaccggaacaacaactttcagaccttcccccaggccgtgctgctcctcttcaggtgtgccaccggggaggcctggcaggacatcatgctggcctgcatgccaggcaagaagtgtgccccagagtccgagcccagcaacagcacggagggtgaaacaccctgtggtagcagctttgctgtcttctacttcatcagcttctacatgctctgtgccttcctgatcatcaacctctttgtagctgtcatcatggacaactttgactacctgacaagggactggtccatccttggtccccaccacctggatgagtttaaaagaatctgggcagagtatgaccctgaagccaagggtcgtatcaaacacctggatgtggtgaccctcctccggcggattcagccgccactaggttttgggaagctgtgccctcaccgcgtggcttgcaaacgcctggtctccatgaacatgcctctgaacagcgacgggacagtcatgttcaatgccaccctgtttgccctggtcaggacggccctgaggatcaaaacagaagggaacctagaacaagccaatgaggagctgcgggcgatcatcaagaagatctggaagcggaccagcatgaagctgctggaccaggtggtgccccctgcaggtgatgatgaggtcaccgttggcaagttctacgccacgttcctgatccaggagtacttccggaagttcaagaagcgcaaagagcagggccttgtgggcaagccctcccagaggaacgcgctgtctctgcaggctggcttgcgcacactgcatgacatcgggcctgagatccgacgggccatctctggagatctcaccgctgaggaggagctggacaaggccatgaaggaggctgtgtccgctgcttctgaagatgacatcttcaggagggccggtggcctgttcggcaaccacgtcagctactaccaaagcgacggccggagcgccttcccccagaccttcaccactcagcgcccgctgcacatcaacaaggcgggcagcagccagggcgacactgagtcgccatcccacgagaagctggtggactccaccttcaccccgagcagctactcgtccaccggctccaacgccaacatcaacaacgccaacaacaccgccctgggtcgcctccctcgccccgccggctaccccagcacggtcagcactgtggagggccacgggccccccttgtcccctgccatccgggtgcaggaggtggcgtggaagctcagctccaacaggtgccactcccgggagagccaggcagccatggcgggtcaggaggagacgtctcaggatgagacctatgaagtgaagatgaaccatgacacggaggcctgcagtgagcccagcctgctctccacagagatgctctcctaccaggatgacgaaaatcggcaactgacgctcccagaggaggacaagagggacatccggcaatctccgaagaggggtttcctccgctctgcctcactaggtcgaagggcctccttccacctggaatgtctgaagcgacagaaggaccgagggggagacatctctcagaagacagtcctgcccttgcatctggttcatcatcaggcattggcagtggcaggcctgagccccctcctccagagaagccattcccctgcctcattccctaggccttttgccaccccaccagccacacctggcagccgaggctggcccccacagcccgtccccaccctgcggcttgagggggtcgagtccagtgagaaactcaacagcagcttcccatccatccactgcggctcctgggctgagaccacccccggtggcgggggcagcagcgccgcccggagagtccggcccgtctccctcatggtgcccagccaggctggggccccagggaggcagttccacggcagtgccagcagcctggtggaagcggtcttgatttcagaaggactggggcagtttgctcaagatcccaagttcatcgaggtcaccacccaggagctggccgacgcctgcgacatgaccatagaggagatggagagcgcggccgacaacatcctcagcgggggcgccccacagagccccaatggcgccctcttaccctttgtgaactgcagggacgcggggcaggaccgagccgggggcgaagaggacgcgggctgtgtgcgcgcgcggggtcgaccgagtgaggaggagctccaggacagcagggtctacgtcagcagcctgtagtgggcgctgccagatgcgggcttttttttatttgtttcaatgttcctaatgggttcgtttcagaagtgcctcactgttctcgtgacctggagttaaccggaacagcgtcttcattcatttctgttgggaccagacgcggagcctgggtgcgcgagccgccctccgggaggaaggcgcccggctgcgtctgcagaggcggggagaggaggcggcgagggtcccggggcgcgaggaaggcgcctgccctctcccagctcgcaggccccgggcccggccgcgcctccgcggggagagcaccccggcttcccgcgcgccctcaccaaaaggaccctacagcaaacgggtgtctttcgactctgcttgtagaaaccatttgcacatattctgtacgagcctcgctgtctccctagagccagggccctgcggatttggagaagggagcggggcaggacttccaggaggaccccaacccggcccggagagggaggaggaggcctccaggggcgcggagctctggggatgggcgtcgggccggcagtggtgcggctcactccgtccctgcccacctgcgacgggatcccccgaccggcacgggccacgccgagctcccggccagccgccggcccgcaggcagcgcgagggaggagctgcgccgccggctccgcccaaccaggtggtgctgagcttccgctgagcgctcttttgttttgtggtttgacacttttcttgacagcatgttgcagtttcttttcggttttggttttttttaaatgttttattttgctttcccagcgggaggggaggaagaagagtgtttacaaagtcctgtagccccctcacctttctgttttcacttttgccaatgtacatcgggtttggttttcttgtattatttaaacggttgtggtttcctttttccacggaggttcaatagaagccgctgcaggagagttttaccaaccattgtgtatgcccaataatttgttatcatttccttaggtagtaacctatttttgttctggtttggttcggttatctaatggaaaggtaactggcaatgcacttgatgtggtcttgcacatgtgggtgatagagttgggttcctttttatgctgggtgtacaggtgggtttgggagagaggagcatgcgcgagagagtctccgagtgtgtgcgacgcgtgtgtgtgtggtgggttgtctgtgtgcatatgtcctgcccgtgtatatgcacccacaccatgtgcccgtgcacaccagtgactacgcagtcccccctttctggtttagctgtgggaagatctgaatctggggccgtttgaaagcaaaaacaaaccactgtctctgcttctgaaacgggaatcagtaactctttgcattttctgtcccacaagatatgcaaaaacaatgcaataatattcatttaaaaatacaattgtgagttgtgttggcattaaaactgtattttaaaaaaagacagaaatttaagggaaaaacacaagaaggcattttgcttcaatatattccgtgtaatgttttattgcattgataatgtttctgttgaagaaaccgttatacttgaattcaggtcagtttcagtatttttcaaatatttttttaaaactgaattgcaattgtgccaagcgaatataatgaattgaattaagttggttttcggattcacttcttgtatattttgctgcatgtaaagtaaatcattttgtatttggagtgtgacaagctttacctttgaactcaagtgcttttctatatgtggttgggggaaagggaacaagttttctttagtttgcacaatgagcaaaggtatcaccagtgtagtcattattctgctctccacaaacaggtttggacattactgttttgcatatcttgtgtttgcttacatttccctcaatttttccaaaatcgtttgctgggtatgtttgtaccgcctcttgctgtgagagaccaggacctattttattccagtcttcactctgtccactctgctctggtcatctgatttggtacttctccaagaacagcccttcactgtgaggtgcagggaggcgttctgatgagccctcagtcactgggccgtcatccgcatcccccatggaagaggtagctggctttcccttcccttccaccacacggaattttctctttggcttccttaggaaagtgtacactaaccgggaggataaaattaaagtcaggctgcttggagggaggggcatcctcacttccggattcttgttgctctacccaacaaggacagcaggggctcgagaaaggaactggtgaaaccctgatccatctgaaagtcaactctgcgtgctcctttctccatcccttcctcactctggagcagcctttccttcaggcttgccctaatgtttgggctgccggggagggggccaggacaagggaagaggcatccggagctcacagtgggggtgggaacagatttttgtgggggcatctctaatgctcacttatatctccctagaacatcactcttttggtgctgtgtccttcaaatgtatgtcaacagtggtggctgaaaagggactgctttggggaaaacaggacccaaccattcacccagaattgacccattaaatctcttccagtcctagtgttccctgagcccctcttggcacatatataagtaagctagaaattacaataagggacagtccattcctctatgacagcttgctggactgattcatgacaaagtggagaaatgtactcaatactccccggttaacacagtctagaaacagagtttctttatggatatccacacccaagtcatccaaactttcttgattccttttcactgccatcaaggtcctctagaaattgagtttaggtatcatcctttgaaaagttcccaagatttctaccaggaggtacacacaggcgttccctgtctagggcaggaggactatcctagcttgaccttctgatccactagaataagactggcgtatgatgcctgtcatcagaacagactggcacaagtagtgacatcaatgaaccacagcacaatcttccaagtgatgtctactctccacctaaaatggaattttccccatgaccttgtaaaacataattgtcacatcttccatacccctcctgacagcccccaagtgtcaggagaaaacagtcaggggctaagggcccaagggacttgaagaaacaacagtttaaggtctgcagtttggtcaacttaattcttgtcctccgaccagccctgcctctttcatttccagaccttggagaatttttcccagctttgattcagaaggtactagttataacccctttccttcttcttaatccaataggcctcactctcactgggaaatccactcaaaggaacaaggcaatgtctctcattctatttcccagttccaaattccaggtgcttgtctggagtgaagctacccgttactttctcccagcttttctccacccagcatgtctcctgcccatgcagctgaagacagtggggcaacctcaggagaagcagacctttccatgcccaagttcatctcctgagcaacagtgacacctagaaaatgaggactttggaagtcacccaaaagatggtggctactttatggagtcctgaagatacacagccaccactcctaaaggcaaagaaagaaaacacgaatgtaggtcagggatagagtggaaccctggtcatcggggtttttagcctcatcgtgggaaaggtggtaaaggaggatgatggcatctccatccctagaggccaagaattgaaatatcattgtcaaggattagaaacaattcagcaaagaggccacaaaaagggcctgctgactcccagaagacctctttaaaccccaggggaggcaaatacttgctgatggagtctgggccgtttccatattttaaagaagacctgcctctggggcaaatgtcagcacagagaggactgggaggagaatggaggcaagaaaagggcatattttgactccctctgtgcctcttcccagttcatggaaggatgtgttcagcttacccacccacagtgaccagtgtggtggagccgctgacatctcaaggatctatttgggaaggtgagaagagtactcattccatctgggggtgttgttccagccacatcagcctacctggtgggatgtgggggtgtctgccaccctgtcccccctctgctgatgtccctcccctcaggctgtccaggtgccacctgacacaggctgctgtgcaaagacaggcggggaagcccaaacctcactcccagggaggccctcagccgccagagtccaggttctccagaggctacgatttgaggaggttgagggggaagacaggagggaaagaaaagtcctacaactgtcaggaatggggcacctttccctgtccctaagcaaagctccctcttcccactgccctccccagccccagctccctgtcctccccaacacctagtgagaaagacggtgcgtggaagggagtcccatgggcagatgcttacacgacctctttgtgaagcctcttctgggtttaacttcattcatcaatttattcttatgtcaaagcaatgaaacttttctttctggagccagataccaatacaacaggtgaacgggtttctgccacatctctacattgacgggggatgcttgaacaacccccctcactacacagacacacaccgttaaggcacaagggctggggttgagctctagatgagggactttcctgctcctgcaagggtgagcactgtatacacagacaaggagggtgcagtagagtgactcccttggatggaagtagtaccatcagaacctactattattatgacataaattctatttacatacattgagagaatactacaatcaacactttttcctgggatgactttaagaggtttgagccacagcacctgaagtggcaaagatccatggtctttgtagggtattagagaactcttccagtcacctctgaaagcactctagatcttgcagctgagtggatgaagtgtaacaaatctgttgcacgctgagaggagtcagaattagcatttttcatgaaagttccccacgtctctactaagaatgaggaagaaaagactaagactaggtaattacacagaggcttgaaatgttacatcaccagagccaagtcctctcccttcagatcagttactggctgctacacagggacacccccaccttttcagggcatcccatgcactccacttctcaggatctaaggaatttgactttgtagggatcccagaaagggcactgtgccacttcccctggtgtgaatcagacatacattgtacattcatttctaaaattcactcatgcacctcaaaccaaggtcattatccaaaaaaaaaaaaaaaaagctctgggtggaagagtttgtaagttttaagagagggtcatttctatgtgaggaaatgcagaaatggacagaatgattcttattcactgtttgggtctggagaattcccattgtggaaatcttagagatctcaagtttattaccaagggaataaggaaaaaaaggtgagcaggcaccaggccaagcagtggctcccttgccaaggaacctgaggctgcaggtttcagggacccccttgaagaaacctctcctggccattggccaggagaaaagagaagtctctcctgtagagtcacaagagaagcaaaagagggtgggtcactgggtcctggacatagcccccaaccccaagacttcccaatatggagaaactacaccaatgtttaaaaggggaaaaggaaagaacttgtacatcaagggaagatgatttgtaaacacacagtcctgtgcagaaagatccccttcaggaggtgtctccagcatcccaaagctgtgcgcaccttctcttttcctgcctcaggccacctatgcatccagctgcagcccatacccacacctgaaatccatctcttgaatcccagccaggttatataccaccccattgccatgtcctgtcctggccagaatgcatgctgttcccccaagcctcgtgggagtgaggccatgggaaacagagatgagcatgtctggacaagtctgtgatggtagtggatgagaataacccatggcaaaacacgcacattcattaagaaatagggcgacagattccccgttggtgaagcactgaaaggtctattactctcataatattgctgttttattttaatccaccagagctaccatgcaaaactttcctcctgtgaaacgctccagataaagctcctctaatctccccttccctcatgtcctccagctcaaacccaccttcatcccccaaaccaatctgtatcatgcctgttatcagagaggcacagaaagatgggcagtgcctccgttgtcaccattccccacacccctacacacccccacaccctcccctccaggctccacgacttcacagtcttactgttgtaaatatcattgtacagtttgtaatcctcaaataatcccattgtcagaggcctcgcctgatgggccttctcaccctcgagaaaggccagggaatctagaaggggcaacccttcaaggagagcttcagggtcatctctgtgtgagacactattgtatattcctgtaagattgcatttttatctaaggaatgatgttatttaaaaaacaaacaaaaaacacaaaaaataagaattgcaaataaatttcttaacaatgtct

SEQ ID NO: 7 - protein, 2186 aa, Homo sapiens
  ref <308>: DATABASE ACCESSION NUMBER: NCBI / NP_001123299.1
  ref <309>: DATABASE ENTRY DATE: 2014-05-14
  ref <313>: RELEVANT RESIDUES IN SEQ ID NO: (1)..(2186)
MVNENTRMYIPEENHQGSNYGSPRPAHANMNANAAAGLAPEHIPTPGAALSWQAAIDAARQAKLMGSAGNATISTVSSTQRKRQQYGKPKKQGSTTATRPPRALLCLTLKNPIRRACISIVEWKPFEIIILLTIFANCVALAIYIPFPEDDSNATNSNLERVEYLFLIIFTVEAFLKVIAYGLLFHPNAYLRNGWNLLDFIIVVVGLFSAILEQATKADGANALGGKGAGFDVKALRAFRVLRPLRLVSGVPSLQVVLNSIIKAMVPLLHIALLVLFVIIIYAIIGLELFMGKMHKTCYNQEGIADVPAEDDPSPCALETGHGRQCQNGTVCKPGWDGPKHGITNFDNFAFAMLTVFQCITMEGWTDVLYWVNDAVGRDWPWIYFVTLIIIGSFFVLNLVLGVLSGEFSKEREKAKARGDFQKLREKQQLEEDLKGYLDWITQAEDIDPENEDEGMDEEKPRNMSMPTSETESVNTENVAGGDIEGENCGARLAHRISKSKFSRYWRRWNRFCRRKCRAAVKSNVFYWLVIFLVFLNTLTIASEHYNQPNWLTEVQDTANKALLALFTAEMLLKMYSLGLQAYFVSLFNRFDCFVVCGGILETILVETKIMSPLGISVLRCVRLLRIFKITRYWNSLSNLVASLLNSVRSIASLLLLLFLFIIIFSLLGMQLFGGKFNFDEMQTRRSTFDNFPQSLLTVFQILTGEDWNSVMYDGIMAYGGPSFPGMLVCIYFIILFICGNYILLNVFLAIAVDNLADAESLTSAQKEEEEEKERKKLARTASPEKKQELVEKPAVGESKEEKIELKSITADGESPPATKINMDDLQPNENEDKSPYPNPETTGEEDEEEPEMPVGPRPRPLSELHLKEKAVPMPEASAFFIFSSNNRFRLQCHRIVNDTIFTNLILFFILLSSISLAAEDPVQHTSFRNHILFYFDIVFTTIFTIEIALKILGNADYVFTSIFTLEIILKMTAYGAFLHKGSFCRNYFNILDLLVVSVSLISFGIQSSAINVVKILRVLRVLRPLRAINRAKGLKHVVQCVFVAIRTIGNIVIVTTLLQFMFACIGVQLFKGKLYTCSDSSKQTEAECKGNYITYKDGEVDHPIIQPRSWENSKFDFDNVLAAMMALFTVSTFEGWPELLYRSIDSHTEDKGPIYNYRVEISIFFIIYIIIIAFFMMNIFVGFVIVTFQEQGEQEYKNCELDKNQRQCVEYALKARPLRRYIPKNQHQYKVWYVVNSTYFEYLMFVLILLNTICLAMQHYGQSCLFKIAMNILNMLFTGLFTVEMILKLIAFKPKGYFSDPWNVFDFLIVIGSIIDVILSETNHYFCDAWNTFDALIVVGSIVDIAITEVNPAEHTQCSPSMNAEENSRISITFFRLFRVMRLVKLLSRGEGIRTLLWTFIKSFQALPYVALLIVMLFFIYAVIGMQVFGKIALNDTTEINRNNNFQTFPQAVLLLFRCATGEAWQDIMLACMPGKKCAPESEPSNSTEGETPCGSSFAVFYFISFYMLCAFLIINLFVAVIMDNFDYLTRDWSILGPHHLDEFKRIWAEYDPEAKGRIKHLDVVTLLRRIQPPLGFGKLCPHRVACKRLVSMNMPLNSDGTVMFNATLFALVRTALRIKTEGNLEQANEELRAIIKKIWKRTSMKLLDQVVPPAGDDEVTVGKFYATFLIQEYFRKFKKRKEQGLVGKPSQRNALSLQAGLRTLHDIGPEIRRAISGDLTAEEELDKAMKEAVSAASEDDIFRRAGGLFGNHVSYYQSDGRSAFPQTFTTQRPLHINKAGSSQGDTESPSHEKLVDSTFTPSSYSSTGSNANINNANNTALGRLPRPAGYPSTVSTVEGHGPPLSPAIRVQEVAWKLSSNRCHSRESQAAMAGQEETSQDETYEVKMNHDTEACSEPSLLSTEMLSYQDDENRQLTLPEEDKRDIRQSPKRGFLRSASLGRRASFHLECLKRQKDRGGDISQKTVLPLHLVHHQALAVAGLSPLLQRSHSPASFPRPFATPPATPGSRGWPPQPVPTLRLEGVESSEKLNSSFPSIHCGSWAETTPGGGGSSAARRVRPVSLMVPSQAGAPGRQFHGSASSLVEAVLISEGLGQFAQDPKFIEVTTQELADACDMTIEEMESAADNILSGGAPQSPNGALLPFVNCRDAGQDRAGGEEDAGCVRARGRPSEEELQDSRVYVSSL

SEQ ID NO: 8 - DNA, 13603 bp, Homo sapiens
  ref <308>: DATABASE ACCESSION NUMBER: NCBI / NM_001129829.1
  ref <309>: DATABASE ENTRY DATE: 2014-05-14
  ref <313>: RELEVANT RESIDUES IN SEQ ID NO: (1)..(13603)
ttattttttcaaatggtgtagccgccggaggtgcggtgctcagttcttggaaggggcccggatgtactgaggatgcgttacagtttcactcgaggaggcagtagtggaaaggagcagtttttggggtttgatgccataatgggaatcaggtaatcgtcggcggggaagaagaaacgctgcagaccacggcttcctcgaatcttgcgcgaaagccgccggcctcggaggagggattaatccagacccgccggggggtgttttcacatttcttcctcttcgtggctgctcctcctattaaaaccatttttggtccatggtcaatgagaatacgaggatgtacattccagaggaaaaccaccaaggttccaactatgggagcccacgccccgcccatgccaacatgaatgccaatgcggcagcggggctggcccctgagcacatccccaccccgggggctgccctgtcgtggcaggcggccatcgacgcagcccggcaggctaagctgatgggcagcgctggcaatgcgaccatctccacagtcagctccacgcagcggaagcggcagcaatatgggaaacccaagaagcagggcagcaccacggccacacgcccgccccgagccctgctctgcctgaccctgaagaaccccatccggagggcctgcatcagcattgtcgaatggaaaccatttgaaataattattttactgactatttttgccaattgtgtggccttagcgatctatattccctttccagaagatgattccaacgccaccaattccaacctggaacgagtggaatatctctttctcataatttttacggtggaagcgtttttaaaagtaatcgcctatggactcctctttcaccccaatgcctacctccgcaacggctggaacctactagattttataattgtggttgtggggctttttagtgcaattttagaacaagcaaccaaagcagatggggcaaacgctctcggagggaaaggggccggatttgatgtgaaggcgctgagggccttccgcgtgctgcgccccctgcggctggtgtccggagtcccaagtctccaggtggtcctgaattccatcatcaaggccatggtccccctgctgcacatcgccctgcttgtgctgtttgtcatcatcatctacgccatcatcggcttggagctcttcatggggaagatgcacaagacctgctacaaccaggagggcatagcagatgttccagcagaagatgacccttccccttgtgcgctggaaacgggccacgggcggcagtgccagaacggcacggtgtgcaagcccggctgggatggtcccaagcacggcatcaccaactttgacaactttgccttcgccatgctcacggtgttccagtgcatcaccatggagggctggacggacgtgctgtactgggtcaatgatgccgtaggaagggactggccctggatctattttgttacactaatcatcatagggtcattttttgtacttaacttggttctcggtgtgcttagcggagagttttccaaagagagggagaaggccaaggcccggggagatttccagaagctgcgggagaagcagcagctagaagaggatctcaaaggctacctggattggatcactcaggccgaagacatcgatcctgagaatgaggacgaaggcatggatgaggagaagccccgaaacatgagcatgcccaccagtgagaccgagtccgtcaacaccgaaaacgtggctggaggtgacatcgagggagaaaactgcggggccaggctggcccaccggatctccaagtcaaagttcagccgctactggcgccggtggaatcggttctgcagaaggaagtgccgcgccgcagtcaagtctaatgtcttctactggctggtgattttcctggtgttcctcaacacgctcaccattgcctctgagcactacaaccagcccaactggctcacagaagtccaagacacggcaaacaaggccctgctggccctgttcacggcagagatgctcctgaagatgtacagcctgggcctgcaggcctacttcgtgtccctcttcaaccgctttgactgcttcgtcgtgtgtggcggcatcctggagaccatcctggtggagaccaagatcatgtccccactgggcatctccgtgctcagatgcgtccggctgctgaggattttcaagatcacgaggtactggaactccttgagcaacctggtggcatccttgctgaactctgtgcgctccatcgcctccctgctccttctcctcttcctcttcatcatcatcttctccctcctggggatgcagctctttggaggaaagttcaactttgatgagatgcagacccggaggagcacattcgataacttcccccagtccctcctcactgtgtttcagatcctgaccggggaggactggaattcggtgatgtatgatgggatcatggcttatggcggcccctcttttccagggatgttagtctgtatttacttcatcatcctcttcatctgtggaaactatatcctactgaatgtgttcttggccattgctgtggacaacctggctgatgctgagagcctcacatctgcccaaaaggaggaggaagaggagaaggagagaaagaagctggccaggactgccagcccagagaagaaacaagagttggtggagaagccggcagtgggggaatccaaggaggagaagattgagctgaaatccatcacggctgacggagagtctccacccgccaccaagatcaacatggatgacctccagcccaatgaaaatgaggataagagcccctaccccaacccagaaactacaggagaagaggatgaggaggagccagagatgcctgtcggccctcgcccacgaccactctctgagcttcaccttaaggaaaaggcagtgcccatgccagaagccagcgcgtttttcatcttcagctctaacaacaggtttcgcctccagtgccaccgcattgtcaatgacacgatcttcaccaacctgatcctcttcttcattctgctcagcagcatttccctggctgctgaggacccggtccagcacacctccttcaggaaccatattctgttttattttgatattgtttttaccaccattttcaccattgaaattgctctgaagatgactgcttatggggctttcttgcacaagggttctttctgccggaactacttcaacatcctggacctgctggtggtcagcgtgtccctcatctcctttggcatccagtccagtgcaatcaatgtcgtgaagatcttgcgagtcctgcgagtactcaggcccctgagggccatcaacagggccaaggggctaaagcatgtggttcagtgtgtgtttgtcgccatccggaccatcgggaacatcgtgattgtcaccaccctgctgcagttcatgtttgcctgcatcggggtccagctcttcaagggaaagctgtacacctgttcagacagttccaagcagacagaggcggaatgcaagggcaactacatcacgtacaaagacggggaggttgaccaccccatcatccaaccccgcagctgggagaacagcaagtttgactttgacaatgttctggcagccatgatggccctcttcaccgtctccaccttcgaagggtggccagagctgctgtaccgctccatcgactcccacacggaagacaagggccccatctacaactaccgtgtggagatctccatcttcttcatcatctacatcatcatcatcgccttcttcatgatgaacatcttcgtgggcttcgtcatcgtcacctttcaggagcagggggagcaggagtacaagaactgtgagctggacaagaaccagcgacagtgcgtggaatacgccctcaaggcccggcccctgcggaggtacatccccaagaaccagcaccagtacaaagtgtggtacgtggtcaactccacctacttcgagtacctgatgttcgtcctcatcctgctcaacaccatctgcctggccatgcagcactacggccagagctgcctgttcaaaatcgccatgaacatcctcaacatgctcttcactggcctcttcaccgtggagatgatcctgaagctcattgccttcaaacccaagcactatttctgtgatgcatggaatacatttgacgccttgattgttgtgggtagcattgttgatatagcaatcaccgaggtaaacccagctgaacatacccaatgctctccctctatggggccctcctgttctcacccccctcttgctgtgctaactgcacctcctgttgccgacgggttccagaacgcagaggaaaactcccgcatctccatcaccttcttccgcctgttccgggtcatgcgtctggtgaagctgctgagccgtggggagggcatccggacgctgctgtggaccttcatcaagtccttccaggccctgccctatgtggccctcctgatcgtgatgctgttcttcatctacgcggtgatcgggatgcaggtgtttgggaaaattgccctgaatgataccacagagatcaaccggaacaacaactttcagaccttcccccaggccgtgctgctcctcttcaggtgtgccaccggggaggcctggcaggacatcatgctggcctgcatgccaggcaagaagtgtgccccagagtccgagcccagcaacagcacggagggtgaaacaccctgtggtagcagctttgctgtcttctacttcatcagcttctacatgctctgtgccttcctgatcatcaacctctttgtagctgtcatcatggacaactttgactacctgacaagggactggtccatccttggtccccaccacctggatgagtttaaaagaatctgggcagagtatgaccctgaagccaagggtcgtatcaaacacctggatgtggtgaccctcctccggcggattcagccgccactaggttttgggaagctgtgccctcaccgcgtggcttgcaaacgcctggtctccatgaacatgcctctgaacagcgacgggacagtcatgttcaatgccaccctgtttgccctggtcaggacggccctgaggatcaaaacagaagagggacccagcccatcagaggcccaccaaggggctgaggatcctttccgccctgcagggaacctagaacaagccaatgaggagctgcgggcgatcatcaagaagatctggaagcggaccagcatgaagctgctggaccaggtggtgccccctgcaggtgatgatgaggtcaccgttggcaagttctacgccacgttcctgatccaggagtacttccggaagttcaagaagcgcaaagagcagggccttgtgggcaagccctcccagaggaacgcgctgtctctgcaggctggcttgcgcacactgcatgacatcgggcctgagatccgacgggccatctctggagatctcaccgctgaggaggagctggacaaggccatgaaggaggctgtgtccgctgcttctgaagatgacatcttcaggagggccggtggcctgttcggcaaccacgtcagctactaccaaagcgacggccggagcgccttcccccagaccttcaccactcagcgcccgctgcacatcaacaaggcgggcagcagccagggcgacactgagtcgccatcccacgagaagctggtggactccaccttcaccccgagcagctactcgtccaccggctccaacgccaacatcaacaacgccaacaacaccgccctgggtcgcctccctcgccccgccggctaccccagcacggtcagcactgtggagggccacgggccccccttgtcccctgccatccgggtgcaggaggtggcgtggaagctcagctccaacaggtgccactcccgggagagccaggcagccatggcgggtcaggaggagacgtctcaggatgagacctatgaagtgaagatgaaccatgacacggaggcctgcagtgagcccagcctgctctccacagagatgctctcctaccaggatgacgaaaatcggcaactgacgctcccagaggaggacaagagggacatccggcaatctccgaagaggggtttcctccgctctgcctcactaggtcgaagggcctccttccacctggaatgtctgaagcgacagaaggaccgagggggagacatctctcagaagacagtcctgcccttgcatctggttcatcatcaggcattggcagtggcaggcctgagccccctcctccagagaagccattcccctgcctcattccctaggccttttgccaccccaccagccacacctggcagccgaggctggcccccacagcccgtccccaccctgcggcttgagggggtcgagtccagtgagaaactcaacagcagcttcccatccatccactgcggctcctgggctgagaccacccccggtggcgggggcagcagcgccgcccggagagtccggcccgtctccctcatggtgcccagccaggctggggccccagggaggcagttccacggcagtgccagcagcctggtggaagcggtcttgatttcagaaggactggggcagtttgctcaagatcccaagttcatcgaggtcaccacccaggagctggccgacgcctgcgacatgaccatagaggagatggagagcgcggccgacaacatcctcagcgggggcgccccacagagccccaatggcgccctcttaccctttgtgaactgcagggacgcggggcaggaccgagccgggggcgaagaggacgcgggctgtgtgcgcgcgcggggtcgaccgagtgaggaggagctccaggacagcagggtctacgtcagcagcctgtagtgggcgctgccagatgcgggcttttttttatttgtttcaatgttcctaatgggttcgtttcagaagtgcctcactgttctcgtgacctggagttaaccggaacagcgtcttcattcatttctgttgggaccagacgcggagcctgggtgcgcgagccgccctccgggaggaaggcgcccggctgcgtctgcagaggcggggagaggaggcggcgagggtcccggggcgcgaggaaggcgcctgccctctcccagctcgcaggccccgggcccggccgcgcctccgcggggagagcaccccggcttcccgcgcgccctcaccaaaaggaccctacagcaaacgggtgtctttcgactctgcttgtagaaaccatttgcacatattctgtacgagcctcgctgtctccctagagccagggccctgcggatttggagaagggagcggggcaggacttccaggaggaccccaacccggcccggagagggaggaggaggcctccaggggcgcggagctctggggatgggcgtcgggccggcagtggtgcggctcactccgtccctgcccacctgcgacgggatcccccgaccggcacgggccacgccgagctcccggccagccgccggcccgcaggcagcgcgagggaggagctgcgccgccggctccgcccaaccaggtggtgctgagcttccgctgagcgctcttttgttttgtggtttgacacttttcttgacagcatgttgcagtttcttttcggttttggttttttttaaatgttttattttgctttcccagcgggaggggaggaagaagagtgtttacaaagtcctgtagccccctcacctttctgttttcacttttgccaatgtacatcgggtttggttttcttgtattatttaaacggttgtggtttcctttttccacggaggttcaatagaagccgctgcaggagagttttaccaaccattgtgtatgcccaataatttgttatcatttccttaggtagtaacctatttttgttctggtttggttcggttatctaatggaaaggtaactggcaatgcacttgatgtggtcttgcacatgtgggtgatagagttgggttcctttttatgctgggtgtacaggtgggtttgggagagaggagcatgcgcgagagagtctccgagtgtgtgcgacgcgtgtgtgtgtggtgggttgtctgtgtgcatatgtcctgcccgtgtatatgcacccacaccatgtgcccgtgcacaccagtgactacgcagtcccccctttctggtttagctgtgggaagatctgaatctggggccgtttgaaagcaaaaacaaaccactgtctctgcttctgaaacgggaatcagtaactctttgcattttctgtcccacaagatatgcaaaaacaatgcaataatattcatttaaaaatacaattgtgagttgtgttggcattaaaactgtattttaaaaaaagacagaaatttaagggaaaaacacaagaaggcattttgcttcaatatattccgtgtaatgttttattgcattgataatgtttctgttgaagaaaccgttatacttgaattcaggtcagtttcagtatttttcaaatatttttttaaaactgaattgcaattgtgccaagcgaatataatgaattgaattaagttggttttcggattcacttcttgtatattttgctgcatgtaaagtaaatcattttgtatttggagtgtgacaagctttacctttgaactcaagtgcttttctatatgtggttgggggaaagggaacaagttttctttagtttgcacaatgagcaaaggtatcaccagtgtagtcattattctgctctccacaaacaggtttggacattactgttttgcatatcttgtgtttgcttacatttccctcaatttttccaaaatcgtttgctgggtatgtttgtaccgcctcttgctgtgagagaccaggacctattttattccagtcttcactctgtccactctgctctggtcatctgatttggtacttctccaagaacagcccttcactgtgaggtgcagggaggcgttctgatgagccctcagtcactgggccgtcatccgcatcccccatggaagaggtagctggctttcccttcccttccaccacacggaattttctctttggcttccttaggaaagtgtacactaaccgggaggataaaattaaagtcaggctgcttggagggaggggcatcctcacttccggattcttgttgctctacccaacaaggacagcaggggctcgagaaaggaactggtgaaaccctgatccatctgaaagtcaactctgcgtgctcctttctccatcccttcctcactctggagcagcctttccttcaggcttgccctaatgtttgggctgccggggagggggccaggacaagggaagaggcatccggagctcacagtgggggtgggaacagatttttgtgggggcatctctaatgctcacttatatctccctagaacatcactcttttggtgctgtgtccttcaaatgtatgtcaacagtggtggctgaaaagggactgctttggggaaaacaggacccaaccattcacccagaattgacccattaaatctcttccagtcctagtgttccctgagcccctcttggcacatatataagtaagctagaaattacaataagggacagtccattcctctatgacagcttgctggactgattcatgacaaagtggagaaatgtactcaatactccccggttaacacagtctagaaacagagtttctttatggatatccacacccaagtcatccaaactttcttgattccttttcactgccatcaaggtcctctagaaattgagtttaggtatcatcctttgaaaagttcccaagatttctaccaggaggtacacacaggcgttccctgtctagggcaggaggactatcctagcttgaccttctgatccactagaataagactggcgtatgatgcctgtcatcagaacagactggcacaagtagtgacatcaatgaaccacagcacaatcttccaagtgatgtctactctccacctaaaatggaattttccccatgaccttgtaaaacataattgtcacatcttccatacccctcctgacagcccccaagtgtcaggagaaaacagtcaggggctaagggcccaagggacttgaagaaacaacagtttaaggtctgcagtttggtcaacttaattcttgtcctccgaccagccctgcctctttcatttccagaccttggagaatttttcccagctttgattcagaaggtactagttataacccctttccttcttcttaatccaataggcctcactctcactgggaaatccactcaaaggaacaaggcaatgtctctcattctatttcccagttccaaattccaggtgcttgtctggagtgaagctacccgttactttctcccagcttttctccacccagcatgtctcctgcccatgcagctgaagacagtggggcaacctcaggagaagcagacctttccatgcccaagttcatctcctgagcaacagtgacacctagaaaatgaggactttggaagtcacccaaaagatggtggctactttatggagtcctgaagatacacagccaccactcctaaaggcaaagaaagaaaacacgaatgtaggtcagggatagagtggaaccctggtcatcggggtttttagcctcatcgtgggaaaggtggtaaaggaggatgatggcatctccatccctagaggccaagaattgaaatatcattgtcaaggattagaaacaattcagcaaagaggccacaaaaagggcctgctgactcccagaagacctctttaaaccccaggggaggcaaatacttgctgatggagtctgggccgtttccatattttaaagaagacctgcctctggggcaaatgtcagcacagagaggactgggaggagaatggaggcaagaaaagggcatattttgactccctctgtgcctcttcccagttcatggaaggatgtgttcagcttacccacccacagtgaccagtgtggtggagccgctgacatctcaaggatctatttgggaaggtgagaagagtactcattccatctgggggtgttgttccagccacatcagcctacctggtgggatgtgggggtgtctgccaccctgtcccccctctgctgatgtccctcccctcaggctgtccaggtgccacctgacacaggctgctgtgcaaagacaggcggggaagcccaaacctcactcccagggaggccctcagccgccagagtccaggttctccagaggctacgatttgaggaggttgagggggaagacaggagggaaagaaaagtcctacaactgtcaggaatggggcacctttccctgtccctaagcaaagctccctcttcccactgccctccccagccccagctccctgtcctccccaacacctagtgagaaagacggtgcgtggaagggagtcccatgggcagatgcttacacgacctctttgtgaagcctcttctgggtttaacttcattcatcaatttattcttatgtcaaagcaatgaaacttttctttctggagccagataccaatacaacaggtgaacgggtttctgccacatctctacattgacgggggatgcttgaacaacccccctcactacacagacacacaccgttaaggcacaagggctggggttgagctctagatgagggactttcctgctcctgcaagggtgagcactgtatacacagacaaggagggtgcagtagagtgactcccttggatggaagtagtaccatcagaacctactattattatgacataaattctatttacatacattgagagaatactacaatcaacactttttcctgggatgactttaagaggtttgagccacagcacctgaagtggcaaagatccatggtctttgtagggtattagagaactcttccagtcacctctgaaagcactctagatcttgcagctgagtggatgaagtgtaacaaatctgttgcacgctgagaggagtcagaattagcatttttcatgaaagttccccacgtctctactaagaatgaggaagaaaagactaagactaggtaattacacagaggcttgaaatgttacatcaccagagccaagtcctctcccttcagatcagttactggctgctacacagggacacccccaccttttcagggcatcccatgcactccacttctcaggatctaaggaatttgactttgtagggatcccagaaagggcactgtgccacttcccctggtgtgaatcagacatacattgtacattcatttctaaaattcactcatgcacctcaaaccaaggtcattatccaaaaaaaaaaaaaaaaagctctgggtggaagagtttgtaagttttaagagagggtcatttctatgtgaggaaatgcagaaatggacagaatgattcttattcactgtttgggtctggagaattcccattgtggaaatcttagagatctcaagtttattaccaagggaataaggaaaaaaaggtgagcaggcaccaggccaagcagtggctcccttgccaaggaacctgaggctgcaggtttcagggacccccttgaagaaacctctcctggccattggccaggagaaaagagaagtctctcctgtagagtcacaagagaagcaaaagagggtgggtcactgggtcctggacatagcccccaaccccaagacttcccaatatggagaaactacaccaatgtttaaaaggggaaaaggaaagaacttgtacatcaagggaagatgatttgtaaacacacagtcctgtgcagaaagatccccttcaggaggtgtctccagcatcccaaagctgtgcgcaccttctcttttcctgcctcaggccacctatgcatccagctgcagcccatacccacacctgaaatccatctcttgaatcccagccaggttatataccaccccattgccatgtcctgtcctggccagaatgcatgctgttcccccaagcctcgtgggagtgaggccatgggaaacagagatgagcatgtctggacaagtctgtgatggtagtggatgagaataacccatggcaaaacacgcacattcattaagaaatagggcgacagattccccgttggtgaagcactgaaaggtctattactctcataatattgctgttttattttaatccaccagagctaccatgcaaaactttcctcctgtgaaacgctccagataaagctcctctaatctccccttccctcatgtcctccagctcaaacccaccttcatcccccaaaccaatctgtatcatgcctgttatcagagaggcacagaaagatgggcagtgcctccgttgtcaccattccccacacccctacacacccccacaccctcccctccaggctccacgacttcacagtcttactgttgtaaatatcattgtacagtttgtaatcctcaaataatcccattgtcagaggcctcgcctgatgggccttctcaccctcgagaaaggccagggaatctagaaggggcaacccttcaaggagagcttcagggtcatctctgtgtgagacactattgtatattcctgtaagattgcatttttatctaaggaatgatgttatttaaaaaacaaacaaaaaacacaaaaaataagaattgcaaataaatttcttaacaatgtct

SEQ ID NO: 9 - protein, 2179 aa, Homo sapiens
  ref <308>: DATABASE ACCESSION NUMBER: NCBI / NP_001123301.1
  ref <309>: DATABASE ENTRY DATE: 2014-05-14
  ref <313>: RELEVANT RESIDUES IN SEQ ID NO: (1)..(2179)
MVNENTRMYIPEENHQGSNYGSPRPAHANMNANAAAGLAPEHIPTPGAALSWQAAIDAARQAKLMGSAGNATISTVSSTQRKRQQYGKPKKQGSTTATRPPRALLCLTLKNPIRRACISIVEWKPFEIIILLTIFANCVALAIYIPFPEDDSNATNSNLERVEYLFLIIFTVEAFLKVIAYGLLFHPNAYLRNGWNLLDFIIVVVGLFSAILEQATKADGANALGGKGAGFDVKALRAFRVLRPLRLVSGVPSLQVVLNSIIKAMVPLLHIALLVLFVIIIYAIIGLELFMGKMHKTCYNQEGIADVPAEDDPSPCALETGHGRQCQNGTVCKPGWDGPKHGITNFDNFAFAMLTVFQCITMEGWTDVLYWVNDAVGRDWPWIYFVTLIIIGSFFVLNLVLGVLSGEFSKEREKAKARGDFQKLREKQQLEEDLKGYLDWITQAEDIDPENEDEGMDEEKPRNMSMPTSETESVNTENVAGGDIEGENCGARLAHRISKSKFSRYWRRWNRFCRRKCRAAVKSNVFYWLVIFLVFLNTLTIASEHYNQPNWLTEVQDTANKALLALFTAEMLLKMYSLGLQAYFVSLFNRFDCFVVCGGILETILVETKIMSPLGISVLRCVRLLRIFKITRYWNSLSNLVASLLNSVRSIASLLLLLFLFIIIFSLLGMQLFGGKFNFDEMQTRRSTFDNFPQSLLTVFQILTGEDWNSVMYDGIMAYGGPSFPGMLVCIYFIILFICGNYILLNVFLAIAVDNLADAESLTSAQKEEEEEKERKKLARTASPEKKQELVEKPAVGESKEEKIELKSITADGESPPATKINMDDLQPNENEDKSPYPNPETTGEEDEEEPEMPVGPRPRPLSELHLKEKAVPMPEASAFFIFSSNNRFRLQCHRIVNDTIFTNLILFFILLSSISLAAEDPVQHTSFRNHILFYFDIVFTTIFTIEIALKMTAYGAFLHKGSFCRNYFNILDLLVVSVSLISFGIQSSAINVVKILRVLRVLRPLRAINRAKGLKHVVQCVFVAIRTIGNIVIVTTLLQFMFACIGVQLFKGKLYTCSDSSKQTEAECKGNYITYKDGEVDHPIIQPRSWENSKFDFDNVLAAMMALFTVSTFEGWPELLYRSIDSHTEDKGPIYNYRVEISIFFIIYIIIIAFFMMNIFVGFVIVTFQEQGEQEYKNCELDKNQRQCVEYALKARPLRRYIPKNQHQYKVWYVVNSTYFEYLMFVLILLNTICLAMQHYGQSCLFKIAMNILNMLFTGLFTVEMILKLIAFKPKHYFCDAWNTFDALIVVGSIVDIAITEVNPAEHTQCSPSMGPSCSHPPLAVLTAPPVADGFQNAEENSRISITFFRLFRVMRLVKLLSRGEGIRTLLWTFIKSFQALPYVALLIVMLFFIYAVIGMQVFGKIALNDTTEINRNNNFQTFPQAVLLLFRCATGEAWQDIMLACMPGKKCAPESEPSNSTEGETPCGSSFAVFYFISFYMLCAFLIINLFVAVIMDNFDYLTRDWSILGPHHLDEFKRIWAEYDPEAKGRIKHLDVVTLLRRIQPPLGFGKLCPHRVACKRLVSMNMPLNSDGTVMFNATLFALVRTALRIKTEEGPSPSEAHQGAEDPFRPAGNLEQANEELRAIIKKIWKRTSMKLLDQVVPPAGDDEVTVGKFYATFLIQEYFRKFKKRKEQGLVGKPSQRNALSLQAGLRTLHDIGPEIRRAISGDLTAEEELDKAMKEAVSAASEDDIFRRAGGLFGNHVSYYQSDGRSAFPQTFTTQRPLHINKAGSSQGDTESPSHEKLVDSTFTPSSYSSTGSNANINNANNTALGRLPRPAGYPSTVSTVEGHGPPLSPAIRVQEVAWKLSSNRCHSRESQAAMAGQEETSQDETYEVKMNHDTEACSEPSLLSTEMLSYQDDENRQLTLPEEDKRDIRQSPKRGFLRSASLGRRASFHLECLKRQKDRGGDISQKTVLPLHLVHHQALAVAGLSPLLQRSHSPASFPRPFATPPATPGSRGWPPQPVPTLRLEGVESSEKLNSSFPSIHCGSWAETTPGGGGSSAARRVRPVSLMVPSQAGAPGRQFHGSASSLVEAVLISEGLGQFAQDPKFIEVTTQELADACDMTIEEMESAADNILSGGAPQSPNGALLPFVNCRDAGQDRAGGEEDAGCVRARGRPSEEELQDSRVYVSSL

SEQ ID NO: 10 - DNA, 13550 bp, Homo sapiens
  ref <308>: DATABASE ACCESSION NUMBER: NCBI / NM_001129830.2
  ref <309>: DATABASE ENTRY DATE: 2014-05-11
  ref <313>: RELEVANT RESIDUES IN SEQ ID NO: (1)..(13550)
gtgctcagttcttggaaggggcccggatgtactgaggatgcgttacagtttcactcgaggaggcagtagtggaaaggagcagtttttggggtttgatgccataatgggaatcaggtaatcgtcggcggggaagaagaaacgctgcagaccacggcttcctcgaatcttgcgcgaaagccgccggcctcggaggagggattaatccagacccgccggggggtgttttcacatttcttcctcttcgtggctgctcctcctattaaaaccatttttggtccatggtcaatgagaatacgaggatgtacattccagaggaaaaccaccaaggttccaactatgggagcccacgccccgcccatgccaacatgaatgccaatgcggcagcggggctggcccctgagcacatccccaccccgggggctgccctgtcgtggcaggcggccatcgacgcagcccggcaggctaagctgatgggcagcgctggcaatgcgaccatctccacagtcagctccacgcagcggaagcggcagcaatatgggaaacccaagaagcagggcagcaccacggccacacgcccgccccgagccctgctctgcctgaccctgaagaaccccatccggagggcctgcatcagcattgtcgaatggaaaccatttgaaataattattttactgactatttttgccaattgtgtggccttagcgatctatattccctttccagaagatgattccaacgccaccaattccaacctggaacgagtggaatatctctttctcataatttttacggtggaagcgtttttaaaagtaatcgcctatggactcctctttcaccccaatgcctacctccgcaacggctggaacctactagattttataattgtggttgtggggctttttagtgcaattttagaacaagcaaccaaagcagatggggcaaacgctctcggagggaaaggggccggatttgatgtgaaggcgctgagggccttccgcgtgctgcgccccctgcggctggtgtccggagtcccaagtctccaggtggtcctgaattccatcatcaaggccatggtccccctgctgcacatcgccctgcttgtgctgtttgtcatcatcatctacgccatcatcggcttggagctcttcatggggaagatgcacaagacctgctacaaccaggagggcatagcagatgttccagcagaagatgacccttccccttgtgcgctggaaacgggccacgggcggcagtgccagaacggcacggtgtgcaagcccggctgggatggtcccaagcacggcatcaccaactttgacaactttgccttcgccatgctcacggtgttccagtgcatcaccatggagggctggacggacgtgctgtactgggtcaatgatgccgtaggaagggactggccctggatctattttgttacactaatcatcatagggtcattttttgtacttaacttggttctcggtgtgcttagcggagagttttccaaagagagggagaaggccaaggcccggggagatttccagaagctgcgggagaagcagcagctagaagaggatctcaaaggctacctggattggatcactcaggccgaagacatcgatcctgagaatgaggacgaaggcatggatgaggagaagccccgaaacatgagcatgcccaccagtgagaccgagtccgtcaacaccgaaaacgtggctggaggtgacatcgagggagaaaactgcggggccaggctggcccaccggatctccaagtcaaagttcagccgctactggcgccggtggaatcggttctgcagaaggaagtgccgcgccgcagtcaagtctaatgtcttctactggctggtgattttcctggtgttcctcaacacgctcaccattgcctctgagcactacaaccagcccaactggctcacagaagtccaagacacggcaaacaaggccctgctggccctgttcacggcagagatgctcctgaagatgtacagcctgggcctgcaggcctacttcgtgtccctcttcaaccgctttgactgcttcgtcgtgtgtggcggcatcctggagaccatcctggtggagaccaagatcatgtccccactgggcatctccgtgctcagatgcgtccggctgctgaggattttcaagatcacgaggtactggaactccttgagcaacctggtggcatccttgctgaactctgtgcgctccatcgcctccctgctccttctcctcttcctcttcatcatcatcttctccctcctggggatgcagctctttggaggaaagttcaactttgatgagatgcagacccggaggagcacattcgataacttcccccagtccctcctcactgtgtttcagatcctgaccggggaggactggaattcggtgatgtatgatgggatcatggcttatggcggcccctcttttccagggatgttagtctgtatttacttcatcatcctcttcatctgtggaaactatatcctactgaatgtgttcttggccattgctgtggacaacctggctgatgctgagagcctcacatctgcccaaaaggaggaggaagaggagaaggagagaaagaagctggccaggactgccagcccagagaagaaacaagagttggtggagaagccggcagtgggggaatccaaggaggagaagattgagctgaaatccatcacggctgacggagagtctccacccgccaccaagatcaacatggatgacctccagcccaatgaaaatgaggataagagcccctaccccaacccagaaactacaggagaagaggatgaggaggagccagagatgcctgtcggccctcgcccacgaccactctctgagcttcaccttaaggaaaaggcagtgcccatgccagaagccagcgcgtttttcatcttcagctctaacaacaggtttcgcctccagtgccaccgcattgtcaatgacacgatcttcaccaacctgatcctcttcttcattctgctcagcagcatttccctggctgctgaggacccggtccagcacacctccttcaggaaccatatcctaggcaatgcagactatgtcttcactagtatctttacattagaaattatccttaagatgactgcttatggggctttcttgcacaagggttctttctgccggaactacttcaacatcctggacctgctggtggtcagcgtgtccctcatctcctttggcatccagtccagtgcaatcaatgtcgtgaagatcttgcgagtcctgcgagtactcaggcccctgagggccatcaacagggccaaggggctaaagcatgtggttcagtgtgtgtttgtcgccatccggaccatcgggaacatcgtgattgtcaccaccctgctgcagttcatgtttgcctgcatcggggtccagctcttcaagggaaagctgtacacctgttcagacagttccaagcagacagaggcggaatgcaagggcaactacatcacgtacaaagacggggaggttgaccaccccatcatccaaccccgcagctgggagaacagcaagtttgactttgacaatgttctggcagccatgatggccctcttcaccgtctccaccttcgaagggtggccagagctgctgtaccgctccatcgactcccacacggaagacaagggccccatctacaactaccgtgtggagatctccatcttcttcatcatctacatcatcatcatcgccttcttcatgatgaacatcttcgtgggcttcgtcatcgtcacctttcaggagcagggggagcaggagtacaagaactgtgagctggacaagaaccagcgacagtgcgtggaatacgccctcaaggcccggcccctgcggaggtacatccccaagaaccagcaccagtacaaagtgtggtacgtggtcaactccacctacttcgagtacctgatgttcgtcctcatcctgctcaacaccatctgcctggccatgcagcactacggccagagctgcctgttcaaaatcgccatgaacatcctcaacatgctcttcactggcctcttcaccgtggagatgatcctgaagctcattgccttcaaacccaagcactatttctgtgatgcatggaatacatttgacgccttgattgttgtgggtagcattgttgatatagcaatcaccgaggtaaacccagctgaacatacccaatgctctccctctatgaacgcagaggaaaactcccgcatctccatcaccttcttccgcctgttccgggtcatgcgtctggtgaagctgctgagccgtggggagggcatccggacgctgctgtggaccttcatcaagtccttccaggccctgccctatgtggccctcctgatcgtgatgctgttcttcatctacgcggtgatcgggatgcaggtgtttgggaaaattgccctgaatgataccacagagatcaaccggaacaacaactttcagaccttcccccaggccgtgctgctcctcttcaggtgtgccaccggggaggcctggcaggacatcatgctggcctgcatgccaggcaagaagtgtgccccagagtccgagcccagcaacagcacggagggtgaaacaccctgtggtagcagctttgctgtcttctacttcatcagcttctacatgctctgtgccttcctgatcatcaacctctttgtagctgtcatcatggacaactttgactacctgacaagggactggtccatccttggtccccaccacctggatgagtttaaaagaatctgggcagagtatgaccctgaagccaagggtcgtatcaaacacctggatgtggtgaccctcctccggcggattcagccgccactaggttttgggaagctgtgccctcaccgcgtggcttgcaaacgcctggtctccatgaacatgcctctgaacagcgacgggacagtcatgttcaatgccaccctgtttgccctggtcaggacggccctgaggatcaaaacagaagggaacctagaacaagccaatgaggagctgcgggcgatcatcaagaagatctggaagcggaccagcatgaagctgctggaccaggtggtgccccctgcaggtgatgatgaggtcaccgttggcaagttctacgccacgttcctgatccaggagtacttccggaagttcaagaagcgcaaagagcagggccttgtgggcaagccctcccagaggaacgcgctgtctctgcaggctggcttgcgcacactgcatgacatcgggcctgagatccgacgggccatctctggagatctcaccgctgaggaggagctggacaaggccatgaaggaggctgtgtccgctgcttctgaagatgacatcttcaggagggccggtggcctgttcggcaaccacgtcagctactaccaaagcgacggccggagcgccttcccccagaccttcaccactcagcgcccgctgcacatcaacaaggcgggcagcagccagggcgacactgagtcgccatcccacgagaagctggtggactccaccttcaccccgagcagctactcgtccaccggctccaacgccaacatcaacaacgccaacaacaccgccctgggtcgcctccctcgccccgccggctaccccagcacggtcagcactgtggagggccacgggccccccttgtcccctgccatccgggtgcaggaggtggcgtggaagctcagctccaacagggaaaggcacgttccgatgtgtgaggatctggagctcaggagggattcaggctcagcagggactcaggctcactgccttctgctcaggagagcaaacccctctaggtgccactcccgggagagccaggcagccatggcgggtcaggaggagacgtctcaggatgagacctatgaagtgaagatgaaccatgacacggaggcctgcagtgagcccagcctgctctccacagagatgctctcctaccaggatgacgaaaatcggcaactgacgctcccagaggaggacaagagggacatccggcaatctccgaagaggggtttcctccgctctgcctcactaggtcgaagggcctccttccacctggaatgtctgaagcgacagaaggaccgagggggagacatctctcagaagacagtcctgcccttgcatctggttcatcatcaggcattggcagtggcaggcctgagccccctcctccagagaagccattcccctgcctcattccctaggccttttgccaccccaccagccacacctggcagccgaggctggcccccacagcccgtccccaccctgcggcttgagggggtcgagtccagtgagaaactcaacagcagcttcccatccatccactgcggctcctgggctgagaccacccccggtggcgggggcagcagcgccgcccggagagtccggcccgtctccctcatggtgcccagccaggctggggccccagggaggcagttccacggcagtgccagcagcctggtggaagcggtcttgatttcagaaggactggggcagtttgctcaagatcccaagttcatcgaggtcaccacccaggagctggccgacgcctgcgacatgaccatagaggagatggagagcgcggccgacaacatcctcagcgggggcgccccacagagccccaatggcgccctcttaccctttgtgaactgcagggacgcggggcaggaccgagccgggggcgaagaggacgcgggctgtgtgcgcgcgcggggtcgaccgagtgaggaggagctccaggacagcagggtctacgtcagcagcctgtagtgggcgctgccagatgcgggcttttttttatttgtttcaatgttcctaatgggttcgtttcagaagtgcctcactgttctcgtgacctggagttaaccggaacagcgtcttcattcatttctgttgggaccagacgcggagcctgggtgcgcgagccgccctccgggaggaaggcgcccggctgcgtctgcagaggcggggagaggaggcggcgagggtcccggggcgcgaggaaggcgcctgccctctcccagctcgcaggccccgggcccggccgcgcctccgcggggagagcaccccggcttcccgcgcgccctcaccaaaaggaccctacagcaaacgggtgtctttcgactctgcttgtagaaaccatttgcacatattctgtacgagcctcgctgtctccctagagccagggccctgcggatttggagaagggagcggggcaggacttccaggaggaccccaacccggcccggagagggaggaggaggcctccaggggcgcggagctctggggatgggcgtcgggccggcagtggtgcggctcactccgtccctgcccacctgcgacgggatcccccgaccggcacgggccacgccgagctcccggccagccgccggcccgcaggcagcgcgagggaggagctgcgccgccggctccgcccaaccaggtggtgctgagcttccgctgagcgctcttttgttttgtggtttgacacttttcttgacagcatgttgcagtttcttttcggttttggttttttttaaatgttttattttgctttcccagcgggaggggaggaagaagagtgtttacaaagtcctgtagccccctcacctttctgttttcacttttgccaatgtacatcgggtttggttttcttgtattatttaaacggttgtggtttcctttttccacggaggttcaatagaagccgctgcaggagagttttaccaaccattgtgtatgcccaataatttgttatcatttccttaggtagtaacctatttttgttctggtttggttcggttatctaatggaaaggtaactggcaatgcacttgatgtggtcttgcacatgtgggtgatagagttgggttcctttttatgctgggtgtacaggtgggtttgggagagaggagcatgcgcgagagagtctccgagtgtgtgcgacgcgtgtgtgtgtggtgggttgtctgtgtgcatatgtcctgcccgtgtatatgcacccacaccatgtgcccgtgcacaccagtgactacgcagtcccccctttctggtttagctgtgggaagatctgaatctggggccgtttgaaagcaaaaacaaaccactgtctctgcttctgaaacgggaatcagtaactctttgcattttctgtcccacaagatatgcaaaaacaatgcaataatattcatttaaaaatacaattgtgagttgtgttggcattaaaactgtattttaaaaaaagacagaaatttaagggaaaaacacaagaaggcattttgcttcaatatattccgtgtaatgttttattgcattgataatgtttctgttgaagaaaccgttatacttgaattcaggtcagtttcagtatttttcaaatatttttttaaaactgaattgcaattgtgccaagcgaatataatgaattgaattaagttggttttcggattcacttcttgtatattttgctgcatgtaaagtaaatcattttgtatttggagtgtgacaagctttacctttgaactcaagtgcttttctatatgtggttgggggaaagggaacaagttttctttagtttgcacaatgagcaaaggtatcaccagtgtagtcattattctgctctccacaaacaggtttggacattactgttttgcatatcttgtgtttgcttacatttccctcaatttttccaaaatcgtttgctgggtatgtttgtaccgcctcttgctgtgagagaccaggacctattttattccagtcttcactctgtccactctgctctggtcatctgatttggtacttctccaagaacagcccttcactgtgaggtgcagggaggcgttctgatgagccctcagtcactgggccgtcatccgcatcccccatggaagaggtagctggctttcccttcccttccaccacacggaattttctctttggcttccttaggaaagtgtacactaaccgggaggataaaattaaagtcaggctgcttggagggaggggcatcctcacttccggattcttgttgctctacccaacaaggacagcaggggctcgagaaaggaactggtgaaaccctgatccatctgaaagtcaactctgcgtgctcctttctccatcccttcctcactctggagcagcctttccttcaggcttgccctaatgtttgggctgccggggagggggccaggacaagggaagaggcatccggagctcacagtgggggtgggaacagatttttgtgggggcatctctaatgctcacttatatctccctagaacatcactcttttggtgctgtgtccttcaaatgtatgtcaacagtggtggctgaaaagggactgctttggggaaaacaggacccaaccattcacccagaattgacccattaaatctcttccagtcctagtgttccctgagcccctcttggcacatatataagtaagctagaaattacaataagggacagtccattcctctatgacagcttgctggactgattcatgacaaagtggagaaatgtactcaatactccccggttaacacagtctagaaacagagtttctttatggatatccacacccaagtcatccaaactttcttgattccttttcactgccatcaaggtcctctagaaattgagtttaggtatcatcctttgaaaagttcccaagatttctaccaggaggtacacacaggcgttccctgtctagggcaggaggactatcctagcttgaccttctgatccactagaataagactggcgtatgatgcctgtcatcagaacagactggcacaagtagtgacatcaatgaaccacagcacaatcttccaagtgatgtctactctccacctaaaatggaattttccccatgaccttgtaaaacataattgtcacatcttccatacccctcctgacagcccccaagtgtcaggagaaaacagtcaggggctaagggcccaagggacttgaagaaacaacagtttaaggtctgcagtttggtcaacttaattcttgtcctccgaccagccctgcctctttcatttccagaccttggagaatttttcccagctttgattcagaaggtactagttataacccctttccttcttcttaatccaataggcctcactctcactgggaaatccactcaaaggaacaaggcaatgtctctcattctatttcccagttccaaattccaggtgcttgtctggagtgaagctacccgttactttctcccagcttttctccacccagcatgtctcctgcccatgcagctgaagacagtggggcaacctcaggagaagcagacctttccatgcccaagttcatctcctgagcaacagtgacacctagaaaatgaggactttggaagtcacccaaaagatggtggctactttatggagtcctgaagatacacagccaccactcctaaaggcaaagaaagaaaacacgaatgtaggtcagggatagagtggaaccctggtcatcggggtttttagcctcatcgtgggaaaggtggtaaaggaggatgatggcatctccatccctagaggccaagaattgaaatatcattgtcaaggattagaaacaattcagcaaagaggccacaaaaagggcctgctgactcccagaagacctctttaaaccccaggggaggcaaatacttgctgatggagtctgggccgtttccatattttaaagaagacctgcctctggggcaaatgtcagcacagagaggactgggaggagaatggaggcaagaaaagggcatattttgactccctctgtgcctcttcccagttcatggaaggatgtgttcagcttacccacccacagtgaccagtgtggtggagccgctgacatctcaaggatctatttgggaaggtgagaagagtactcattccatctgggggtgttgttccagccacatcagcctacctggtgggatgtgggggtgtctgccaccctgtcccccctctgctgatgtccctcccctcaggctgtccaggtgccacctgacacaggctgctgtgcaaagacaggcggggaagcccaaacctcactcccagggaggccctcagccgccagagtccaggttctccagaggctacgatttgaggaggttgagggggaagacaggagggaaagaaaagtcctacaactgtcaggaatggggcacctttccctgtccctaagcaaagctccctcttcccactgccctccccagccccagctccctgtcctccccaacacctagtgagaaagacggtgcgtggaagggagtcccatgggcagatgcttacacgacctctttgtgaagcctcttctgggtttaacttcattcatcaatttattcttatgtcaaagcaatgaaacttttctttctggagccagataccaatacaacaggtgaacgggtttctgccacatctctacattgacgggggatgcttgaacaacccccctcactacacagacacacaccgttaaggcacaagggctggggttgagctctagatgagggactttcctgctcctgcaagggtgagcactgtatacacagacaaggagggtgcagtagagtgactcccttggatggaagtagtaccatcagaacctactattattatgacataaattctatttacatacattgagagaatactacaatcaacactttttcctgggatgactttaagaggtttgagccacagcacctgaagtggcaaagatccatggtctttgtagggtattagagaactcttccagtcacctctgaaagcactctagatcttgcagctgagtggatgaagtgtaacaaatctgttgcacgctgagaggagtcagaattagcatttttcatgaaagttccccacgtctctactaagaatgaggaagaaaagactaagactaggtaattacacagaggcttgaaatgttacatcaccagagccaagtcctctcccttcagatcagttactggctgctacacagggacacccccaccttttcagggcatcccatgcactccacttctcaggatctaaggaatttgactttgtagggatcccagaaagggcactgtgccacttcccctggtgtgaatcagacatacattgtacattcatttctaaaattcactcatgcacctcaaaccaaggtcattatccaaaaaaaaaaaaaaaaagctctgggtggaagagtttgtaagttttaagagagggtcatttctatgtgaggaaatgcagaaatggacagaatgattcttattcactgtttgggtctggagaattcccattgtggaaatcttagagatctcaagtttattaccaagggaataaggaaaaaaaggtgagcaggcaccaggccaagcagtggctcccttgccaaggaacctgaggctgcaggtttcagggacccccttgaagaaacctctcctggccattggccaggagaaaagagaagtctctcctgtagagtcacaagagaagcaaaagagggtgggtcactgggtcctggacatagcccccaaccccaagacttcccaatatggagaaactacaccaatgtttaaaaggggaaaaggaaagaacttgtacatcaagggaagatgatttgtaaacacacagtcctgtgcagaaagatccccttcaggaggtgtctccagcatcccaaagctgtgcgcaccttctcttttcctgcctcaggccacctatgcatccagctgcagcccatacccacacctgaaatccatctcttgaatcccagccaggttatataccaccccattgccatgtcctgtcctggccagaatgcatgctgttcccccaagcctcgtgggagtgaggccatgggaaacagagatgagcatgtctggacaagtctgtgatggtagtggatgagaataacccatggcaaaacacgcacattcattaagaaatagggcgacagattccccgttggtgaagcactgaaaggtctattactctcataatattgctgttttattttaatccaccagagctaccatgcaaaactttcctcctgtgaaacgctccagataaagctcctctaatctccccttccctcatgtcctccagctcaaacccaccttcatcccccaaaccaatctgtatcatgcctgttatcagagaggcacagaaagatgggcagtgcctccgttgtcaccattccccacacccctacacacccccacaccctcccctccaggctccacgacttcacagtcttactgttgtaaatatcattgtacagtttgtaatcctcaaataatcccattgtcagaggcctcgcctgatgggccttctcaccctcgagaaaggccagggaatctagaaggggcaacccttcaaggagagcttcagggtcatctctgtgtgagacactattgtatattcctgtaagattgcatttttatctaaggaatgatgttatttaaaaaacaaacaaaaaacacaaaaaataagaattgcaaataaatttcttaacaatgtct

SEQ ID NO: 11 - protein, 2173 aa, Homo sapiens
  ref <308>: DATABASE ACCESSION NUMBER: NCBI / NP_001123302.2
  ref <309>: DATABASE ENTRY DATE: 2014-05-11
  ref <313>: RELEVANT RESIDUES IN SEQ ID NO: (1)..(2173)
MVNENTRMYIPEENHQGSNYGSPRPAHANMNANAAAGLAPEHIPTPGAALSWQAAIDAARQAKLMGSAGNATISTVSSTQRKRQQYGKPKKQGSTTATRPPRALLCLTLKNPIRRACISIVEWKPFEIIILLTIFANCVALAIYIPFPEDDSNATNSNLERVEYLFLIIFTVEAFLKVIAYGLLFHPNAYLRNGWNLLDFIIVVVGLFSAILEQATKADGANALGGKGAGFDVKALRAFRVLRPLRLVSGVPSLQVVLNSIIKAMVPLLHIALLVLFVIIIYAIIGLELFMGKMHKTCYNQEGIADVPAEDDPSPCALETGHGRQCQNGTVCKPGWDGPKHGITNFDNFAFAMLTVFQCITMEGWTDVLYWVNDAVGRDWPWIYFVTLIIIGSFFVLNLVLGVLSGEFSKEREKAKARGDFQKLREKQQLEEDLKGYLDWITQAEDIDPENEDEGMDEEKPRNMSMPTSETESVNTENVAGGDIEGENCGARLAHRISKSKFSRYWRRWNRFCRRKCRAAVKSNVFYWLVIFLVFLNTLTIASEHYNQPNWLTEVQDTANKALLALFTAEMLLKMYSLGLQAYFVSLFNRFDCFVVCGGILETILVETKIMSPLGISVLRCVRLLRIFKITRYWNSLSNLVASLLNSVRSIASLLLLLFLFIIIFSLLGMQLFGGKFNFDEMQTRRSTFDNFPQSLLTVFQILTGEDWNSVMYDGIMAYGGPSFPGMLVCIYFIILFICGNYILLNVFLAIAVDNLADAESLTSAQKEEEEEKERKKLARTASPEKKQELVEKPAVGESKEEKIELKSITADGESPPATKINMDDLQPNENEDKSPYPNPETTGEEDEEEPEMPVGPRPRPLSELHLKEKAVPMPEASAFFIFSSNNRFRLQCHRIVNDTIFTNLILFFILLSSISLAAEDPVQHTSFRNHILGNADYVFTSIFTLEIILKMTAYGAFLHKGSFCRNYFNILDLLVVSVSLISFGIQSSAINVVKILRVLRVLRPLRAINRAKGLKHVVQCVFVAIRTIGNIVIVTTLLQFMFACIGVQLFKGKLYTCSDSSKQTEAECKGNYITYKDGEVDHPIIQPRSWENSKFDFDNVLAAMMALFTVSTFEGWPELLYRSIDSHTEDKGPIYNYRVEISIFFIIYIIIIAFFMMNIFVGFVIVTFQEQGEQEYKNCELDKNQRQCVEYALKARPLRRYIPKNQHQYKVWYVVNSTYFEYLMFVLILLNTICLAMQHYGQSCLFKIAMNILNMLFTGLFTVEMILKLIAFKPKHYFCDAWNTFDALIVVGSIVDIAITEVNPAEHTQCSPSMNAEENSRISITFFRLFRVMRLVKLLSRGEGIRTLLWTFIKSFQALPYVALLIVMLFFIYAVIGMQVFGKIALNDTTEINRNNNFQTFPQAVLLLFRCATGEAWQDIMLACMPGKKCAPESEPSNSTEGETPCGSSFAVFYFISFYMLCAFLIINLFVAVIMDNFDYLTRDWSILGPHHLDEFKRIWAEYDPEAKGRIKHLDVVTLLRRIQPPLGFGKLCPHRVACKRLVSMNMPLNSDGTVMFNATLFALVRTALRIKTEGNLEQANEELRAIIKKIWKRTSMKLLDQVVPPAGDDEVTVGKFYATFLIQEYFRKFKKRKEQGLVGKPSQRNALSLQAGLRTLHDIGPEIRRAISGDLTAEEELDKAMKEAVSAASEDDIFRRAGGLFGNHVSYYQSDGRSAFPQTFTTQRPLHINKAGSSQGDTESPSHEKLVDSTFTPSSYSSTGSNANINNANNTALGRLPRPAGYPSTVSTVEGHGPPLSPAIRVQEVAWKLSSNRERHVPMCEDLELRRDSGSAGTQAHCLLLRRANPSRCHSRESQAAMAGQEETSQDETYEVKMNHDTEACSEPSLLSTEMLSYQDDENRQLTLPEEDKRDIRQSPKRGFLRSASLGRRASFHLECLKRQKDRGGDISQKTVLPLHLVHHQALAVAGLSPLLQRSHSPASFPRPFATPPATPGSRGWPPQPVPTLRLEGVESSEKLNSSFPSIHCGSWAETTPGGGGSSAARRVRPVSLMVPSQAGAPGRQFHGSASSLVEAVLISEGLGQFAQDPKFIEVTTQELADACDMTIEEMESAADNILSGGAPQSPNGALLPFVNCRDAGQDRAGGEEDAGCVRARGRPSEEELQDSRVYVSSL

SEQ ID NO: 12 - DNA, 13564 bp, Homo sapiens
  ref <308>: DATABASE ACCESSION NUMBER: NCBI / NM_001129831.1
  ref <309>: DATABASE ENTRY DATE: 2014-05-14
  ref <313>: RELEVANT RESIDUES IN SEQ ID NO: (1)..(13564)
ttattttttcaaatggtgtagccgccggaggtgcggtgctcagttcttggaaggggcccggatgtactgaggatgcgttacagtttcactcgaggaggcagtagtggaaaggagcagtttttggggtttgatgccataatgggaatcaggtaatcgtcggcggggaagaagaaacgctgcagaccacggcttcctcgaatcttgcgcgaaagccgccggcctcggaggagggattaatccagacccgccggggggtgttttcacatttcttcctcttcgtggctgctcctcctattaaaaccatttttggtccatggtcaatgagaatacgaggatgtacattccagaggaaaaccaccaaggttccaactatgggagcccacgccccgcccatgccaacatgaatgccaatgcggcagcggggctggcccctgagcacatccccaccccgggggctgccctgtcgtggcaggcggccatcgacgcagcccggcaggctaagctgatgggcagcgctggcaatgcgaccatctccacagtcagctccacgcagcggaagcggcagcaatatgggaaacccaagaagcagggcagcaccacggccacacgcccgccccgagccctgctctgcctgaccctgaagaaccccatccggagggcctgcatcagcattgtcgaatggaaaccatttgaaataattattttactgactatttttgccaattgtgtggccttagcgatctatattccctttccagaagatgattccaacgccaccaattccaacctggaacgagtggaatatctctttctcataatttttacggtggaagcgtttttaaaagtaatcgcctatggactcctctttcaccccaatgcctacctccgcaacggctggaacctactagattttataattgtggttgtggggctttttagtgcaattttagaacaagcaaccaaagcagatggggcaaacgctctcggagggaaaggggccggatttgatgtgaaggcgctgagggccttccgcgtgctgcgccccctgcggctggtgtccggagtcccaagtctccaggtggtcctgaattccatcatcaaggccatggtccccctgctgcacatcgccctgcttgtgctgtttgtcatcatcatctacgccatcatcggcttggagctcttcatggggaagatgcacaagacctgctacaaccaggagggcatagcagatgttccagcagaagatgacccttccccttgtgcgctggaaacgggccacgggcggcagtgccagaacggcacggtgtgcaagcccggctgggatggtcccaagcacggcatcaccaactttgacaactttgccttcgccatgctcacggtgttccagtgcatcaccatggagggctggacggacgtgctgtactgggtcaatgatgccgtaggaagggactggccctggatctattttgttacactaatcatcatagggtcattttttgtacttaacttggttctcggtgtgcttagcggagagttttccaaagagagggagaaggccaaggcccggggagatttccagaagctgcgggagaagcagcagctagaagaggatctcaaaggctacctggattggatcactcaggccgaagacatcgatcctgagaatgaggacgaaggcatggatgaggagaagccccgaaacatgagcatgcccaccagtgagaccgagtccgtcaacaccgaaaacgtggctggaggtgacatcgagggagaaaactgcggggccaggctggcccaccggatctccaagtcaaagttcagccgctactggcgccggtggaatcggttctgcagaaggaagtgccgcgccgcagtcaagtctaatgtcttctactggctggtgattttcctggtgttcctcaacacgctcaccattgcctctgagcactacaaccagcccaactggctcacagaagtccaagacacggcaaacaaggccctgctggccctgttcacggcagagatgctcctgaagatgtacagcctgggcctgcaggcctacttcgtgtccctcttcaaccgctttgactgcttcgtcgtgtgtggcggcatcctggagaccatcctggtggagaccaagatcatgtccccactgggcatctccgtgctcagatgcgtccggctgctgaggattttcaagatcacgaggtactggaactccttgagcaacctggtggcatccttgctgaactctgtgcgctccatcgcctccctgctccttctcctcttcctcttcatcatcatcttctccctcctggggatgcagctctttggaggaaagttcaactttgatgagatgcagacccggaggagcacattcgataacttcccccagtccctcctcactgtgtttcagatcctgaccggggaggactggaattcggtgatgtatgatgggatcatggcttatggcggcccctcttttccagggatgttagtctgtatttacttcatcatcctcttcatctgtggaaactatatcctactgaatgtgttcttggccattgctgtggacaacctggctgatgctgagagcctcacatctgcccaaaaggaggaggaagaggagaaggagagaaagaagctggccaggactgccagcccagagaagaaacaagagttggtggagaagccggcagtgggggaatccaaggaggagaagattgagctgaaatccatcacggctgacggagagtctccacccgccaccaagatcaacatggatgacctccagcccaatgaaaatgaggataagagcccctaccccaacccagaaactacaggagaagaggatgaggaggagccagagatgcctgtcggccctcgcccacgaccactctctgagcttcaccttaaggaaaaggcagtgcccatgccagaagccagcgcgtttttcatcttcagctctaacaacaggtttcgcctccagtgccaccgcattgtcaatgacacgatcttcaccaacctgatcctcttcttcattctgctcagcagcatttccctggctgctgaggacccggtccagcacacctccttcaggaaccatattctgttttattttgatattgtttttaccaccattttcaccattgaaattgctctgaagatgactgcttatggggctttcttgcacaagggttctttctgccggaactacttcaacatcctggacctgctggtggtcagcgtgtccctcatctcctttggcatccagtccagtgcaatcaatgtcgtgaagatcttgcgagtcctgcgagtactcaggcccctgagggccatcaacagggccaaggggctaaagcatgtggttcagtgtgtgtttgtcgccatccggaccatcgggaacatcgtgattgtcaccaccctgctgcagttcatgtttgcctgcatcggggtccagctcttcaagggaaagctgtacacctgttcagacagttccaagcagacagaggcggaatgcaagggcaactacatcacgtacaaagacggggaggttgaccaccccatcatccaaccccgcagctgggagaacagcaagtttgactttgacaatgttctggcagccatgatggccctcttcaccgtctccaccttcgaagggtggccagagctgctgtaccgctccatcgactcccacacggaagacaagggccccatctacaactaccgtgtggagatctccatcttcttcatcatctacatcatcatcatcgccttcttcatgatgaacatcttcgtgggcttcgtcatcgtcacctttcaggagcagggggagcaggagtacaagaactgtgagctggacaagaaccagcgacagtgcgtggaatacgccctcaaggcccggcccctgcggaggtacatccccaagaaccagcaccagtacaaagtgtggtacgtggtcaactccacctacttcgagtacctgatgttcgtcctcatcctgctcaacaccatctgcctggccatgcagcactacggccagagctgcctgttcaaaatcgccatgaacatcctcaacatgctcttcactggcctcttcaccgtggagatgatcctgaagctcattgccttcaaacccaagggttactttagtgatccctggaatgtttttgacttcctcatcgtaattggcagcataattgacgtcattctcagtgagactaatcactatttctgtgatgcatggaatacatttgacgccttgattgttgtgggtagcattgttgatatagcaatcaccgaggtaaacccagctgaacatacccaatgctctccctctatgaacgcagaggaaaactcccgcatctccatcaccttcttccgcctgttccgggtcatgcgtctggtgaagctgctgagccgtggggagggcatccggacgctgctgtggaccttcatcaagtccttccaggccctgccctatgtggccctcctgatcgtgatgctgttcttcatctacgcggtgatcgggatgcaggtgtttgggaaaattgccctgaatgataccacagagatcaaccggaacaacaactttcagaccttcccccaggccgtgctgctcctcttcaggtgtgccaccggggaggcctggcaggacatcatgctggcctgcatgccaggcaagaagtgtgccccagagtccgagcccagcaacagcacggagggtgaaacaccctgtggtagcagctttgctgtcttctacttcatcagcttctacatgctctgtgccttcctgatcatcaacctctttgtagctgtcatcatggacaactttgactacctgacaagggactggtccatccttggtccccaccacctggatgagtttaaaagaatctgggcagagtatgaccctgaagccaagggtcgtatcaaacacctggatgtggtgaccctcctccggcggattcagccgccactaggttttgggaagctgtgccctcaccgcgtggcttgcaaacgcctggtctccatgaacatgcctctgaacagcgacgggacagtcatgttcaatgccaccctgtttgccctggtcaggacggccctgaggatcaaaacagaagggaacctagaacaagccaatgaggagctgcgggcgatcatcaagaagatctggaagcggaccagcatgaagctgctggaccaggtggtgccccctgcaggtgatgatgaggtcaccgttggcaagttctacgccacgttcctgatccaggagtacttccggaagttcaagaagcgcaaagagcagggccttgtgggcaagccctcccagaggaacgcgctgtctctgcaggctggcttgcgcacactgcatgacatcgggcctgagatccgacgggccatctctggagatctcaccgctgaggaggagctggacaaggccatgaaggaggctgtgtccgctgcttctgaagatgacatcttcaggagggccggtggcctgttcggcaaccacgtcagctactaccaaagcgacggccggagcgccttcccccagaccttcaccactcagcgcccgctgcacatcaacaaggcgggcagcagccagggcgacactgagtcgccatcccacgagaagctggtggactccaccttcaccccgagcagctactcgtccaccggctccaacgccaacatcaacaacgccaacaacaccgccctgggtcgcctccctcgccccgccggctaccccagcacggtcagcactgtggagggccacgggccccccttgtcccctgccatccgggtgcaggaggtggcgtggaagctcagctccaacaggtgccactcccgggagagccaggcagccatggcgggtcaggaggagacgtctcaggatgagacctatgaagtgaagatgaaccatgacacggaggcctgcagtgagcccagcctgctctccacagagatgctctcctaccaggatgacgaaaatcggcaactgacgctcccagaggaggacaagagggacatccggcaatctccgaagaggggtttcctccgctctgcctcactaggtcgaagggcctccttccacctggaatgtctgaagcgacagaaggaccgagggggagacatctctcagaagacagtcctgcccttgcatctggttcatcatcaggcattggcagtggcaggcctgagccccctcctccagagaagccattcccctgcctcattccctaggccttttgccaccccaccagccacacctggcagccgaggctggcccccacagcccgtccccaccctgcggcttgagggggtcgagtccagtgagaaactcaacagcagcttcccatccatccactgcggctcctgggctgagaccacccccggtggcgggggcagcagcgccgcccggagagtccggcccgtctccctcatggtgcccagccaggctggggccccagggaggcagttccacggcagtgccagcagcctggtggaagcggtcttgatttcagaaggactggggcagtttgctcaagatcccaagttcatcgaggtcaccacccaggagctggccgacgcctgcgacatgaccatagaggagatggagagcgcggccgacaacatcctcagcgggggcgccccacagagccccaatggcgccctcttaccctttgtgaactgcagggacgcggggcaggaccgagccgggggcgaagaggacgcgggctgtgtgcgcgcgcggggtcgaccgagtgaggaggagctccaggacagcagggtctacgtcagcagcctgtagtgggcgctgccagatgcgggcttttttttatttgtttcaatgttcctaatgggttcgtttcagaagtgcctcactgttctcgtgacctggagttaaccggaacagcgtcttcattcatttctgttgggaccagacgcggagcctgggtgcgcgagccgccctccgggaggaaggcgcccggctgcgtctgcagaggcggggagaggaggcggcgagggtcccggggcgcgaggaaggcgcctgccctctcccagctcgcaggccccgggcccggccgcgcctccgcggggagagcaccccggcttcccgcgcgccctcaccaaaaggaccctacagcaaacgggtgtctttcgactctgcttgtagaaaccatttgcacatattctgtacgagcctcgctgtctccctagagccagggccctgcggatttggagaagggagcggggcaggacttccaggaggaccccaacccggcccggagagggaggaggaggcctccaggggcgcggagctctggggatgggcgtcgggccggcagtggtgcggctcactccgtccctgcccacctgcgacgggatcccccgaccggcacgggccacgccgagctcccggccagccgccggcccgcaggcagcgcgagggaggagctgcgccgccggctccgcccaaccaggtggtgctgagcttccgctgagcgctcttttgttttgtggtttgacacttttcttgacagcatgttgcagtttcttttcggttttggttttttttaaatgttttattttgctttcccagcgggaggggaggaagaagagtgtttacaaagtcctgtagccccctcacctttctgttttcacttttgccaatgtacatcgggtttggttttcttgtattatttaaacggttgtggtttcctttttccacggaggttcaatagaagccgctgcaggagagttttaccaaccattgtgtatgcccaataatttgttatcatttccttaggtagtaacctatttttgttctggtttggttcggttatctaatggaaaggtaactggcaatgcacttgatgtggtcttgcacatgtgggtgatagagttgggttcctttttatgctgggtgtacaggtgggtttgggagagaggagcatgcgcgagagagtctccgagtgtgtgcgacgcgtgtgtgtgtggtgggttgtctgtgtgcatatgtcctgcccgtgtatatgcacccacaccatgtgcccgtgcacaccagtgactacgcagtcccccctttctggtttagctgtgggaagatctgaatctggggccgtttgaaagcaaaaacaaaccactgtctctgcttctgaaacgggaatcagtaactctttgcattttctgtcccacaagatatgcaaaaacaatgcaataatattcatttaaaaatacaattgtgagttgtgttggcattaaaactgtattttaaaaaaagacagaaatttaagggaaaaacacaagaaggcattttgcttcaatatattccgtgtaatgttttattgcattgataatgtttctgttgaagaaaccgttatacttgaattcaggtcagtttcagtatttttcaaatatttttttaaaactgaattgcaattgtgccaagcgaatataatgaattgaattaagttggttttcggattcacttcttgtatattttgctgcatgtaaagtaaatcattttgtatttggagtgtgacaagctttacctttgaactcaagtgcttttctatatgtggttgggggaaagggaacaagttttctttagtttgcacaatgagcaaaggtatcaccagtgtagtcattattctgctctccacaaacaggtttggacattactgttttgcatatcttgtgtttgcttacatttccctcaatttttccaaaatcgtttgctgggtatgtttgtaccgcctcttgctgtgagagaccaggacctattttattccagtcttcactctgtccactctgctctggtcatctgatttggtacttctccaagaacagcccttcactgtgaggtgcagggaggcgttctgatgagccctcagtcactgggccgtcatccgcatcccccatggaagaggtagctggctttcccttcccttccaccacacggaattttctctttggcttccttaggaaagtgtacactaaccgggaggataaaattaaagtcaggctgcttggagggaggggcatcctcacttccggattcttgttgctctacccaacaaggacagcaggggctcgagaaaggaactggtgaaaccctgatccatctgaaagtcaactctgcgtgctcctttctccatcccttcctcactctggagcagcctttccttcaggcttgccctaatgtttgggctgccggggagggggccaggacaagggaagaggcatccggagctcacagtgggggtgggaacagatttttgtgggggcatctctaatgctcacttatatctccctagaacatcactcttttggtgctgtgtccttcaaatgtatgtcaacagtggtggctgaaaagggactgctttggggaaaacaggacccaaccattcacccagaattgacccattaaatctcttccagtcctagtgttccctgagcccctcttggcacatatataagtaagctagaaattacaataagggacagtccattcctctatgacagcttgctggactgattcatgacaaagtggagaaatgtactcaatactccccggttaacacagtctagaaacagagtttctttatggatatccacacccaagtcatccaaactttcttgattccttttcactgccatcaaggtcctctagaaattgagtttaggtatcatcctttgaaaagttcccaagatttctaccaggaggtacacacaggcgttccctgtctagggcaggaggactatcctagcttgaccttctgatccactagaataagactggcgtatgatgcctgtcatcagaacagactggcacaagtagtgacatcaatgaaccacagcacaatcttccaagtgatgtctactctccacctaaaatggaattttccccatgaccttgtaaaacataattgtcacatcttccatacccctcctgacagcccccaagtgtcaggagaaaacagtcaggggctaagggcccaagggacttgaagaaacaacagtttaaggtctgcagtttggtcaacttaattcttgtcctccgaccagccctgcctctttcatttccagaccttggagaatttttcccagctttgattcagaaggtactagttataacccctttccttcttcttaatccaataggcctcactctcactgggaaatccactcaaaggaacaaggcaatgtctctcattctatttcccagttccaaattccaggtgcttgtctggagtgaagctacccgttactttctcccagcttttctccacccagcatgtctcctgcccatgcagctgaagacagtggggcaacctcaggagaagcagacctttccatgcccaagttcatctcctgagcaacagtgacacctagaaaatgaggactttggaagtcacccaaaagatggtggctactttatggagtcctgaagatacacagccaccactcctaaaggcaaagaaagaaaacacgaatgtaggtcagggatagagtggaaccctggtcatcggggtttttagcctcatcgtgggaaaggtggtaaaggaggatgatggcatctccatccctagaggccaagaattgaaatatcattgtcaaggattagaaacaattcagcaaagaggccacaaaaagggcctgctgactcccagaagacctctttaaaccccaggggaggcaaatacttgctgatggagtctgggccgtttccatattttaaagaagacctgcctctggggcaaatgtcagcacagagaggactgggaggagaatggaggcaagaaaagggcatattttgactccctctgtgcctcttcccagttcatggaaggatgtgttcagcttacccacccacagtgaccagtgtggtggagccgctgacatctcaaggatctatttgggaaggtgagaagagtactcattccatctgggggtgttgttccagccacatcagcctacctggtgggatgtgggggtgtctgccaccctgtcccccctctgctgatgtccctcccctcaggctgtccaggtgccacctgacacaggctgctgtgcaaagacaggcggggaagcccaaacctcactcccagggaggccctcagccgccagagtccaggttctccagaggctacgatttgaggaggttgagggggaagacaggagggaaagaaaagtcctacaactgtcaggaatggggcacctttccctgtccctaagcaaagctccctcttcccactgccctccccagccccagctccctgtcctccccaacacctagtgagaaagacggtgcgtggaagggagtcccatgggcagatgcttacacgacctctttgtgaagcctcttctgggtttaacttcattcatcaatttattcttatgtcaaagcaatgaaacttttctttctggagccagataccaatacaacaggtgaacgggtttctgccacatctctacattgacgggggatgcttgaacaacccccctcactacacagacacacaccgttaaggcacaagggctggggttgagctctagatgagggactttcctgctcctgcaagggtgagcactgtatacacagacaaggagggtgcagtagagtgactcccttggatggaagtagtaccatcagaacctactattattatgacataaattctatttacatacattgagagaatactacaatcaacactttttcctgggatgactttaagaggtttgagccacagcacctgaagtggcaaagatccatggtctttgtagggtattagagaactcttccagtcacctctgaaagcactctagatcttgcagctgagtggatgaagtgtaacaaatctgttgcacgctgagaggagtcagaattagcatttttcatgaaagttccccacgtctctactaagaatgaggaagaaaagactaagactaggtaattacacagaggcttgaaatgttacatcaccagagccaagtcctctcccttcagatcagttactggctgctacacagggacacccccaccttttcagggcatcccatgcactccacttctcaggatctaaggaatttgactttgtagggatcccagaaagggcactgtgccacttcccctggtgtgaatcagacatacattgtacattcatttctaaaattcactcatgcacctcaaaccaaggtcattatccaaaaaaaaaaaaaaaaagctctgggtggaagagtttgtaagttttaagagagggtcatttctatgtgaggaaatgcagaaatggacagaatgattcttattcactgtttgggtctggagaattcccattgtggaaatcttagagatctcaagtttattaccaagggaataaggaaaaaaaggtgagcaggcaccaggccaagcagtggctcccttgccaaggaacctgaggctgcaggtttcagggacccccttgaagaaacctctcctggccattggccaggagaaaagagaagtctctcctgtagagtcacaagagaagcaaaagagggtgggtcactgggtcctggacatagcccccaaccccaagacttcccaatatggagaaactacaccaatgtttaaaaggggaaaaggaaagaacttgtacatcaagggaagatgatttgtaaacacacagtcctgtgcagaaagatccccttcaggaggtgtctccagcatcccaaagctgtgcgcaccttctcttttcctgcctcaggccacctatgcatccagctgcagcccatacccacacctgaaatccatctcttgaatcccagccaggttatataccaccccattgccatgtcctgtcctggccagaatgcatgctgttcccccaagcctcgtgggagtgaggccatgggaaacagagatgagcatgtctggacaagtctgtgatggtagtggatgagaataacccatggcaaaacacgcacattcattaagaaatagggcgacagattccccgttggtgaagcactgaaaggtctattactctcataatattgctgttttattttaatccaccagagctaccatgcaaaactttcctcctgtgaaacgctccagataaagctcctctaatctccccttccctcatgtcctccagctcaaacccaccttcatcccccaaaccaatctgtatcatgcctgttatcagagaggcacagaaagatgggcagtgcctccgttgtcaccattccccacacccctacacacccccacaccctcccctccaggctccacgacttcacagtcttactgttgtaaatatcattgtacagtttgtaatcctcaaataatcccattgtcagaggcctcgcctgatgggccttctcaccctcgagaaaggccagggaatctagaaggggcaacccttcaaggagagcttcagggtcatctctgtgtgagacactattgtatattcctgtaagattgcatttttatctaaggaatgatgttatttaaaaaacaaacaaaaaacacaaaaaataagaattgcaaataaatttcttaacaatgtct

SEQ ID NO: 13 - protein, 2166 aa, Homo sapiens
  ref <308>: DATABASE ACCESSION NUMBER: NCBI / NP_001123303.1
  ref <309>: DATABASE ENTRY DATE: 2014-05-14
  ref <313>: RELEVANT RESIDUES IN SEQ ID NO: (1)..(2166)
MVNENTRMYIPEENHQGSNYGSPRPAHANMNANAAAGLAPEHIPTPGAALSWQAAIDAARQAKLMGSAGNATISTVSSTQRKRQQYGKPKKQGSTTATRPPRALLCLTLKNPIRRACISIVEWKPFEIIILLTIFANCVALAIYIPFPEDDSNATNSNLERVEYLFLIIFTVEAFLKVIAYGLLFHPNAYLRNGWNLLDFIIVVVGLFSAILEQATKADGANALGGKGAGFDVKALRAFRVLRPLRLVSGVPSLQVVLNSIIKAMVPLLHIALLVLFVIIIYAIIGLELFMGKMHKTCYNQEGIADVPAEDDPSPCALETGHGRQCQNGTVCKPGWDGPKHGITNFDNFAFAMLTVFQCITMEGWTDVLYWVNDAVGRDWPWIYFVTLIIIGSFFVLNLVLGVLSGEFSKEREKAKARGDFQKLREKQQLEEDLKGYLDWITQAEDIDPENEDEGMDEEKPRNMSMPTSETESVNTENVAGGDIEGENCGARLAHRISKSKFSRYWRRWNRFCRRKCRAAVKSNVFYWLVIFLVFLNTLTIASEHYNQPNWLTEVQDTANKALLALFTAEMLLKMYSLGLQAYFVSLFNRFDCFVVCGGILETILVETKIMSPLGISVLRCVRLLRIFKITRYWNSLSNLVASLLNSVRSIASLLLLLFLFIIIFSLLGMQLFGGKFNFDEMQTRRSTFDNFPQSLLTVFQILTGEDWNSVMYDGIMAYGGPSFPGMLVCIYFIILFICGNYILLNVFLAIAVDNLADAESLTSAQKEEEEEKERKKLARTASPEKKQELVEKPAVGESKEEKIELKSITADGESPPATKINMDDLQPNENEDKSPYPNPETTGEEDEEEPEMPVGPRPRPLSELHLKEKAVPMPEASAFFIFSSNNRFRLQCHRIVNDTIFTNLILFFILLSSISLAAEDPVQHTSFRNHILFYFDIVFTTIFTIEIALKMTAYGAFLHKGSFCRNYFNILDLLVVSVSLISFGIQSSAINVVKILRVLRVLRPLRAINRAKGLKHVVQCVFVAIRTIGNIVIVTTLLQFMFACIGVQLFKGKLYTCSDSSKQTEAECKGNYITYKDGEVDHPIIQPRSWENSKFDFDNVLAAMMALFTVSTFEGWPELLYRSIDSHTEDKGPIYNYRVEISIFFIIYIIIIAFFMMNIFVGFVIVTFQEQGEQEYKNCELDKNQRQCVEYALKARPLRRYIPKNQHQYKVWYVVNSTYFEYLMFVLILLNTICLAMQHYGQSCLFKIAMNILNMLFTGLFTVEMILKLIAFKPKGYFSDPWNVFDFLIVIGSIIDVILSETNHYFCDAWNTFDALIVVGSIVDIAITEVNPAEHTQCSPSMNAEENSRISITFFRLFRVMRLVKLLSRGEGIRTLLWTFIKSFQALPYVALLIVMLFFIYAVIGMQVFGKIALNDTTEINRNNNFQTFPQAVLLLFRCATGEAWQDIMLACMPGKKCAPESEPSNSTEGETPCGSSFAVFYFISFYMLCAFLIINLFVAVIMDNFDYLTRDWSILGPHHLDEFKRIWAEYDPEAKGRIKHLDVVTLLRRIQPPLGFGKLCPHRVACKRLVSMNMPLNSDGTVMFNATLFALVRTALRIKTEGNLEQANEELRAIIKKIWKRTSMKLLDQVVPPAGDDEVTVGKFYATFLIQEYFRKFKKRKEQGLVGKPSQRNALSLQAGLRTLHDIGPEIRRAISGDLTAEEELDKAMKEAVSAASEDDIFRRAGGLFGNHVSYYQSDGRSAFPQTFTTQRPLHINKAGSSQGDTESPSHEKLVDSTFTPSSYSSTGSNANINNANNTALGRLPRPAGYPSTVSTVEGHGPPLSPAIRVQEVAWKLSSNRCHSRESQAAMAGQEETSQDETYEVKMNHDTEACSEPSLLSTEMLSYQDDENRQLTLPEEDKRDIRQSPKRGFLRSASLGRRASFHLECLKRQKDRGGDISQKTVLPLHLVHHQALAVAGLSPLLQRSHSPASFPRPFATPPATPGSRGWPPQPVPTLRLEGVESSEKLNSSFPSIHCGSWAETTPGGGGSSAARRVRPVSLMVPSQAGAPGRQFHGSASSLVEAVLISEGLGQFAQDPKFIEVTTQELADACDMTIEEMESAADNILSGGAPQSPNGALLPFVNCRDAGQDRAGGEEDAGCVRARGRPSEEELQDSRVYVSSL

SEQ ID NO: 14 - DNA, 13540 bp, Homo sapiens
  ref <308>: DATABASE ACCESSION NUMBER: NCBI / NM_001129832.1
  ref <309>: DATABASE ENTRY DATE: 2014-05-14
  ref <313>: RELEVANT RESIDUES IN SEQ ID NO: (1)..(13540)
ttattttttcaaatggtgtagccgccggaggtgcggtgctcagttcttggaaggggcccggatgtactgaggatgcgttacagtttcactcgaggaggcagtagtggaaaggagcagtttttggggtttgatgccataatgggaatcaggtaatcgtcggcggggaagaagaaacgctgcagaccacggcttcctcgaatcttgcgcgaaagccgccggcctcggaggagggattaatccagacccgccggggggtgttttcacatttcttcctcttcgtggctgctcctcctattaaaaccatttttggtccatggtcaatgagaatacgaggatgtacattccagaggaaaaccaccaaggttccaactatgggagcccacgccccgcccatgccaacatgaatgccaatgcggcagcggggctggcccctgagcacatccccaccccgggggctgccctgtcgtggcaggcggccatcgacgcagcccggcaggctaagctgatgggcagcgctggcaatgcgaccatctccacagtcagctccacgcagcggaagcggcagcaatatgggaaacccaagaagcagggcagcaccacggccacacgcccgccccgagccctgctctgcctgaccctgaagaaccccatccggagggcctgcatcagcattgtcgaatggaaaccatttgaaataattattttactgactatttttgccaattgtgtggccttagcgatctatattccctttccagaagatgattccaacgccaccaattccaacctggaacgagtggaatatctctttctcataatttttacggtggaagcgtttttaaaagtaatcgcctatggactcctctttcaccccaatgcctacctccgcaacggctggaacctactagattttataattgtggttgtggggctttttagtgcaattttagaacaagcaaccaaagcagatggggcaaacgctctcggagggaaaggggccggatttgatgtgaaggcgctgagggccttccgcgtgctgcgccccctgcggctggtgtccggagtcccaagtctccaggtggtcctgaattccatcatcaaggccatggtccccctgctgcacatcgccctgcttgtgctgtttgtcatcatcatctacgccatcatcggcttggagctcttcatggggaagatgcacaagacctgctacaaccaggagggcatagcagatgttccagcagaagatgacccttccccttgtgcgctggaaacgggccacgggcggcagtgccagaacggcacggtgtgcaagcccggctgggatggtcccaagcacggcatcaccaactttgacaactttgccttcgccatgctcacggtgttccagtgcatcaccatggagggctggacggacgtgctgtactgggtcaatgatgccgtaggaagggactggccctggatctattttgttacactaatcatcatagggtcattttttgtacttaacttggttctcggtgtgcttagcggagagttttccaaagagagggagaaggccaaggcccggggagatttccagaagctgcgggagaagcagcagctagaagaggatctcaaaggctacctggattggatcactcaggccgaagacatcgatcctgagaatgaggacgaaggcatggatgaggagaagccccgaaacatgagcatgcccaccagtgagaccgagtccgtcaacaccgaaaacgtggctggaggtgacatcgagggagaaaactgcggggccaggctggcccaccggatctccaagtcaaagttcagccgctactggcgccggtggaatcggttctgcagaaggaagtgccgcgccgcagtcaagtctaatgtcttctactggctggtgattttcctggtgttcctcaacacgctcaccattgcctctgagcactacaaccagcccaactggctcacagaagtccaagacacggcaaacaaggccctgctggccctgttcacggcagagatgctcctgaagatgtacagcctgggcctgcaggcctacttcgtgtccctcttcaaccgctttgactgcttcgtcgtgtgtggcggcatcctggagaccatcctggtggagaccaagatcatgtccccactgggcatctccgtgctcagatgcgtccggctgctgaggattttcaagatcacgaggtactggaactccttgagcaacctggtggcatccttgctgaactctgtgcgctccatcgcctccctgctccttctcctcttcctcttcatcatcatcttctccctcctggggatgcagctctttggaggaaagttcaactttgatgagatgcagacccggaggagcacattcgataacttcccccagtccctcctcactgtgtttcagatcctgaccggggaggactggaattcggtgatgtatgatgggatcatggcttatggcggcccctcttttccagggatgttagtctgtatttacttcatcatcctcttcatctgtggaaactatatcctactgaatgtgttcttggccattgctgtggacaacctggctgatgctgagagcctcacatctgcccaaaaggaggaggaagaggagaaggagagaaagaagctggccaggactgccagcccagagaagaaacaagagttggtggagaagccggcagtgggggaatccaaggaggagaagattgagctgaaatccatcacggctgacggagagtctccacccgccaccaagatcaacatggatgacctccagcccaatgaaaatgaggataagagcccctaccccaacccagaaactacaggagaagaggatgaggaggagccagagatgcctgtcggccctcgcccacgaccactctctgagcttcaccttaaggaaaaggcagtgcccatgccagaagccagcgcgtttttcatcttcagctctaacaacaggtttcgcctccagtgccaccgcattgtcaatgacacgatcttcaccaacctgatcctcttcttcattctgctcagcagcatttccctggctgctgaggacccggtccagcacacctccttcaggaaccatattctgttttattttgatattgtttttaccaccattttcaccattgaaattgctctgaagatcctaggcaatgcagactatgtcttcactagtatctttacattagaaattatccttaagatgactgcttatggggctttcttgcacaagggttctttctgccggaactacttcaacatcctggacctgctggtggtcagcgtgtccctcatctcctttggcatccagtccagtgcaatcaatgtcgtgaagatcttgcgagtcctgcgagtactcaggcccctgagggccatcaacagggccaaggggctaaagcatgtggttcagtgtgtgtttgtcgccatccggaccatcgggaacatcgtgattgtcaccaccctgctgcagttcatgtttgcctgcatcggggtccagctcttcaagggaaagctgtacacctgttcagacagttccaagcagacagaggcggaatgcaagggcaactacatcacgtacaaagacggggaggttgaccaccccatcatccaaccccgcagctgggagaacagcaagtttgactttgacaatgttctggcagccatgatggccctcttcaccgtctccaccttcgaagggtggccagagctgctgtaccgctccatcgactcccacacggaagacaagggccccatctacaactaccgtgtggagatctccatcttcttcatcatctacatcatcatcatcgccttcttcatgatgaacatcttcgtgggcttcgtcatcgtcacctttcaggagcagggggagcaggagtacaagaactgtgagctggacaagaaccagcgacagtgcgtggaatacgccctcaaggcccggcccctgcggaggtacatccccaagaaccagcaccagtacaaagtgtggtacgtggtcaactccacctacttcgagtacctgatgttcgtcctcatcctgctcaacaccatctgcctggccatgcagcactacggccagagctgcctgttcaaaatcgccatgaacatcctcaacatgctcttcactggcctcttcaccgtggagatgatcctgaagctcattgccttcaaacccaagcactatttctgtgatgcatggaatacatttgacgccttgattgttgtgggtagcattgttgatatagcaatcaccgaggtaaacccagctgaacatacccaatgctctccctctatgaacgcagaggaaaactcccgcatctccatcaccttcttccgcctgttccgggtcatgcgtctggtgaagctgctgagccgtggggagggcatccggacgctgctgtggaccttcatcaagtccttccaggccctgccctatgtggccctcctgatcgtgatgctgttcttcatctacgcggtgatcgggatgcaggtgtttgggaaaattgccctgaatgataccacagagatcaaccggaacaacaactttcagaccttcccccaggccgtgctgctcctcttcaggtgtgccaccggggaggcctggcaggacatcatgctggcctgcatgccaggcaagaagtgtgccccagagtccgagcccagcaacagcacggagggtgaaacaccctgtggtagcagctttgctgtcttctacttcatcagcttctacatgctctgtgccttcctgatcatcaacctctttgtagctgtcatcatggacaactttgactacctgacaagggactggtccatccttggtccccaccacctggatgagtttaaaagaatctgggcagagtatgaccctgaagccaagggtcgtatcaaacacctggatgtggtgaccctcctccggcggattcagccgccactaggttttgggaagctgtgccctcaccgcgtggcttgcaaacgcctggtctccatgaacatgcctctgaacagcgacgggacagtcatgttcaatgccaccctgtttgccctggtcaggacggccctgaggatcaaaacagaagggaacctagaacaagccaatgaggagctgcgggcgatcatcaagaagatctggaagcggaccagcatgaagctgctggaccaggtggtgccccctgcaggtgatgatgaggtcaccgttggcaagttctacgccacgttcctgatccaggagtacttccggaagttcaagaagcgcaaagagcagggccttgtgggcaagccctcccagaggaacgcgctgtctctgcaggctggcttgcgcacactgcatgacatcgggcctgagatccgacgggccatctctggagatctcaccgctgaggaggagctggacaaggccatgaaggaggctgtgtccgctgcttctgaagatgacatcttcaggagggccggtggcctgttcggcaaccacgtcagctactaccaaagcgacggccggagcgccttcccccagaccttcaccactcagcgcccgctgcacatcaacaaggcgggcagcagccagggcgacactgagtcgccatcccacgagaagctggtggactccaccttcaccccgagcagctactcgtccaccggctccaacgccaacatcaacaacgccaacaacaccgccctgggtcgcctccctcgccccgccggctaccccagcacggtcagcactgtggagggccacgggccccccttgtcccctgccatccgggtgcaggaggtggcgtggaagctcagctccaacaggtgccactcccgggagagccaggcagccatggcgggtcaggaggagacgtctcaggatgagacctatgaagtgaagatgaaccatgacacggaggcctgcagtgagcccagcctgctctccacagagatgctctcctaccaggatgacgaaaatcggcaactgacgctcccagaggaggacaagagggacatccggcaatctccgaagaggggtttcctccgctctgcctcactaggtcgaagggcctccttccacctggaatgtctgaagcgacagaaggaccgagggggagacatctctcagaagacagtcctgcccttgcatctggttcatcatcaggcattggcagtggcaggcctgagccccctcctccagagaagccattcccctgcctcattccctaggccttttgccaccccaccagccacacctggcagccgaggctggcccccacagcccgtccccaccctgcggcttgagggggtcgagtccagtgagaaactcaacagcagcttcccatccatccactgcggctcctgggctgagaccacccccggtggcgggggcagcagcgccgcccggagagtccggcccgtctccctcatggtgcccagccaggctggggccccagggaggcagttccacggcagtgccagcagcctggtggaagcggtcttgatttcagaaggactggggcagtttgctcaagatcccaagttcatcgaggtcaccacccaggagctggccgacgcctgcgacatgaccatagaggagatggagagcgcggccgacaacatcctcagcgggggcgccccacagagccccaatggcgccctcttaccctttgtgaactgcagggacgcggggcaggaccgagccgggggcgaagaggacgcgggctgtgtgcgcgcgcggggtcgaccgagtgaggaggagctccaggacagcagggtctacgtcagcagcctgtagtgggcgctgccagatgcgggcttttttttatttgtttcaatgttcctaatgggttcgtttcagaagtgcctcactgttctcgtgacctggagttaaccggaacagcgtcttcattcatttctgttgggaccagacgcggagcctgggtgcgcgagccgccctccgggaggaaggcgcccggctgcgtctgcagaggcggggagaggaggcggcgagggtcccggggcgcgaggaaggcgcctgccctctcccagctcgcaggccccgggcccggccgcgcctccgcggggagagcaccccggcttcccgcgcgccctcaccaaaaggaccctacagcaaacgggtgtctttcgactctgcttgtagaaaccatttgcacatattctgtacgagcctcgctgtctccctagagccagggccctgcggatttggagaagggagcggggcaggacttccaggaggaccccaacccggcccggagagggaggaggaggcctccaggggcgcggagctctggggatgggcgtcgggccggcagtggtgcggctcactccgtccctgcccacctgcgacgggatcccccgaccggcacgggccacgccgagctcccggccagccgccggcccgcaggcagcgcgagggaggagctgcgccgccggctccgcccaaccaggtggtgctgagcttccgctgagcgctcttttgttttgtggtttgacacttttcttgacagcatgttgcagtttcttttcggttttggttttttttaaatgttttattttgctttcccagcgggaggggaggaagaagagtgtttacaaagtcctgtagccccctcacctttctgttttcacttttgccaatgtacatcgggtttggttttcttgtattatttaaacggttgtggtttcctttttccacggaggttcaatagaagccgctgcaggagagttttaccaaccattgtgtatgcccaataatttgttatcatttccttaggtagtaacctatttttgttctggtttggttcggttatctaatggaaaggtaactggcaatgcacttgatgtggtcttgcacatgtgggtgatagagttgggttcctttttatgctgggtgtacaggtgggtttgggagagaggagcatgcgcgagagagtctccgagtgtgtgcgacgcgtgtgtgtgtggtgggttgtctgtgtgcatatgtcctgcccgtgtatatgcacccacaccatgtgcccgtgcacaccagtgactacgcagtcccccctttctggtttagctgtgggaagatctgaatctggggccgtttgaaagcaaaaacaaaccactgtctctgcttctgaaacgggaatcagtaactctttgcattttctgtcccacaagatatgcaaaaacaatgcaataatattcatttaaaaatacaattgtgagttgtgttggcattaaaactgtattttaaaaaaagacagaaatttaagggaaaaacacaagaaggcattttgcttcaatatattccgtgtaatgttttattgcattgataatgtttctgttgaagaaaccgttatacttgaattcaggtcagtttcagtatttttcaaatatttttttaaaactgaattgcaattgtgccaagcgaatataatgaattgaattaagttggttttcggattcacttcttgtatattttgctgcatgtaaagtaaatcattttgtatttggagtgtgacaagctttacctttgaactcaagtgcttttctatatgtggttgggggaaagggaacaagttttctttagtttgcacaatgagcaaaggtatcaccagtgtagtcattattctgctctccacaaacaggtttggacattactgttttgcatatcttgtgtttgcttacatttccctcaatttttccaaaatcgtttgctgggtatgtttgtaccgcctcttgctgtgagagaccaggacctattttattccagtcttcactctgtccactctgctctggtcatctgatttggtacttctccaagaacagcccttcactgtgaggtgcagggaggcgttctgatgagccctcagtcactgggccgtcatccgcatcccccatggaagaggtagctggctttcccttcccttccaccacacggaattttctctttggcttccttaggaaagtgtacactaaccgggaggataaaattaaagtcaggctgcttggagggaggggcatcctcacttccggattcttgttgctctacccaacaaggacagcaggggctcgagaaaggaactggtgaaaccctgatccatctgaaagtcaactctgcgtgctcctttctccatcccttcctcactctggagcagcctttccttcaggcttgccctaatgtttgggctgccggggagggggccaggacaagggaagaggcatccggagctcacagtgggggtgggaacagatttttgtgggggcatctctaatgctcacttatatctccctagaacatcactcttttggtgctgtgtccttcaaatgtatgtcaacagtggtggctgaaaagggactgctttggggaaaacaggacccaaccattcacccagaattgacccattaaatctcttccagtcctagtgttccctgagcccctcttggcacatatataagtaagctagaaattacaataagggacagtccattcctctatgacagcttgctggactgattcatgacaaagtggagaaatgtactcaatactccccggttaacacagtctagaaacagagtttctttatggatatccacacccaagtcatccaaactttcttgattccttttcactgccatcaaggtcctctagaaattgagtttaggtatcatcctttgaaaagttcccaagatttctaccaggaggtacacacaggcgttccctgtctagggcaggaggactatcctagcttgaccttctgatccactagaataagactggcgtatgatgcctgtcatcagaacagactggcacaagtagtgacatcaatgaaccacagcacaatcttccaagtgatgtctactctccacctaaaatggaattttccccatgaccttgtaaaacataattgtcacatcttccatacccctcctgacagcccccaagtgtcaggagaaaacagtcaggggctaagggcccaagggacttgaagaaacaacagtttaaggtctgcagtttggtcaacttaattcttgtcctccgaccagccctgcctctttcatttccagaccttggagaatttttcccagctttgattcagaaggtactagttataacccctttccttcttcttaatccaataggcctcactctcactgggaaatccactcaaaggaacaaggcaatgtctctcattctatttcccagttccaaattccaggtgcttgtctggagtgaagctacccgttactttctcccagcttttctccacccagcatgtctcctgcccatgcagctgaagacagtggggcaacctcaggagaagcagacctttccatgcccaagttcatctcctgagcaacagtgacacctagaaaatgaggactttggaagtcacccaaaagatggtggctactttatggagtcctgaagatacacagccaccactcctaaaggcaaagaaagaaaacacgaatgtaggtcagggatagagtggaaccctggtcatcggggtttttagcctcatcgtgggaaaggtggtaaaggaggatgatggcatctccatccctagaggccaagaattgaaatatcattgtcaaggattagaaacaattcagcaaagaggccacaaaaagggcctgctgactcccagaagacctctttaaaccccaggggaggcaaatacttgctgatggagtctgggccgtttccatattttaaagaagacctgcctctggggcaaatgtcagcacagagaggactgggaggagaatggaggcaagaaaagggcatattttgactccctctgtgcctcttcccagttcatggaaggatgtgttcagcttacccacccacagtgaccagtgtggtggagccgctgacatctcaaggatctatttgggaaggtgagaagagtactcattccatctgggggtgttgttccagccacatcagcctacctggtgggatgtgggggtgtctgccaccctgtcccccctctgctgatgtccctcccctcaggctgtccaggtgccacctgacacaggctgctgtgcaaagacaggcggggaagcccaaacctcactcccagggaggccctcagccgccagagtccaggttctccagaggctacgatttgaggaggttgagggggaagacaggagggaaagaaaagtcctacaactgtcaggaatggggcacctttccctgtccctaagcaaagctccctcttcccactgccctccccagccccagctccctgtcctccccaacacctagtgagaaagacggtgcgtggaagggagtcccatgggcagatgcttacacgacctctttgtgaagcctcttctgggtttaacttcattcatcaatttattcttatgtcaaagcaatgaaacttttctttctggagccagataccaatacaacaggtgaacgggtttctgccacatctctacattgacgggggatgcttgaacaacccccctcactacacagacacacaccgttaaggcacaagggctggggttgagctctagatgagggactttcctgctcctgcaagggtgagcactgtatacacagacaaggagggtgcagtagagtgactcccttggatggaagtagtaccatcagaacctactattattatgacataaattctatttacatacattgagagaatactacaatcaacactttttcctgggatgactttaagaggtttgagccacagcacctgaagtggcaaagatccatggtctttgtagggtattagagaactcttccagtcacctctgaaagcactctagatcttgcagctgagtggatgaagtgtaacaaatctgttgcacgctgagaggagtcagaattagcatttttcatgaaagttccccacgtctctactaagaatgaggaagaaaagactaagactaggtaattacacagaggcttgaaatgttacatcaccagagccaagtcctctcccttcagatcagttactggctgctacacagggacacccccaccttttcagggcatcccatgcactccacttctcaggatctaaggaatttgactttgtagggatcccagaaagggcactgtgccacttcccctggtgtgaatcagacatacattgtacattcatttctaaaattcactcatgcacctcaaaccaaggtcattatccaaaaaaaaaaaaaaaaagctctgggtggaagagtttgtaagttttaagagagggtcatttctatgtgaggaaatgcagaaatggacagaatgattcttattcactgtttgggtctggagaattcccattgtggaaatcttagagatctcaagtttattaccaagggaataaggaaaaaaaggtgagcaggcaccaggccaagcagtggctcccttgccaaggaacctgaggctgcaggtttcagggacccccttgaagaaacctctcctggccattggccaggagaaaagagaagtctctcctgtagagtcacaagagaagcaaaagagggtgggtcactgggtcctggacatagcccccaaccccaagacttcccaatatggagaaactacaccaatgtttaaaaggggaaaaggaaagaacttgtacatcaagggaagatgatttgtaaacacacagtcctgtgcagaaagatccccttcaggaggtgtctccagcatcccaaagctgtgcgcaccttctcttttcctgcctcaggccacctatgcatccagctgcagcccatacccacacctgaaatccatctcttgaatcccagccaggttatataccaccccattgccatgtcctgtcctggccagaatgcatgctgttcccccaagcctcgtgggagtgaggccatgggaaacagagatgagcatgtctggacaagtctgtgatggtagtggatgagaataacccatggcaaaacacgcacattcattaagaaatagggcgacagattccccgttggtgaagcactgaaaggtctattactctcataatattgctgttttattttaatccaccagagctaccatgcaaaactttcctcctgtgaaacgctccagataaagctcctctaatctccccttccctcatgtcctccagctcaaacccaccttcatcccccaaaccaatctgtatcatgcctgttatcagagaggcacagaaagatgggcagtgcctccgttgtcaccattccccacacccctacacacccccacaccctcccctccaggctccacgacttcacagtcttactgttgtaaatatcattgtacagtttgtaatcctcaaataatcccattgtcagaggcctcgcctgatgggccttctcaccctcgagaaaggccagggaatctagaaggggcaacccttcaaggagagcttcagggtcatctctgtgtgagacactattgtatattcctgtaagattgcatttttatctaaggaatgatgttatttaaaaaacaaacaaaaaacacaaaaaataagaattgcaaataaatttcttaacaatgtct

SEQ ID NO: 15 - protein, 2158 aa, Homo sapiens
  ref <308>: DATABASE ACCESSION NUMBER: NCBI / NP_001123304.1
  ref <309>: DATABASE ENTRY DATE: 2014-05-14
  ref <313>: RELEVANT RESIDUES IN SEQ ID NO: (1)..(2158)
MVNENTRMYIPEENHQGSNYGSPRPAHANMNANAAAGLAPEHIPTPGAALSWQAAIDAARQAKLMGSAGNATISTVSSTQRKRQQYGKPKKQGSTTATRPPRALLCLTLKNPIRRACISIVEWKPFEIIILLTIFANCVALAIYIPFPEDDSNATNSNLERVEYLFLIIFTVEAFLKVIAYGLLFHPNAYLRNGWNLLDFIIVVVGLFSAILEQATKADGANALGGKGAGFDVKALRAFRVLRPLRLVSGVPSLQVVLNSIIKAMVPLLHIALLVLFVIIIYAIIGLELFMGKMHKTCYNQEGIADVPAEDDPSPCALETGHGRQCQNGTVCKPGWDGPKHGITNFDNFAFAMLTVFQCITMEGWTDVLYWVNDAVGRDWPWIYFVTLIIIGSFFVLNLVLGVLSGEFSKEREKAKARGDFQKLREKQQLEEDLKGYLDWITQAEDIDPENEDEGMDEEKPRNMSMPTSETESVNTENVAGGDIEGENCGARLAHRISKSKFSRYWRRWNRFCRRKCRAAVKSNVFYWLVIFLVFLNTLTIASEHYNQPNWLTEVQDTANKALLALFTAEMLLKMYSLGLQAYFVSLFNRFDCFVVCGGILETILVETKIMSPLGISVLRCVRLLRIFKITRYWNSLSNLVASLLNSVRSIASLLLLLFLFIIIFSLLGMQLFGGKFNFDEMQTRRSTFDNFPQSLLTVFQILTGEDWNSVMYDGIMAYGGPSFPGMLVCIYFIILFICGNYILLNVFLAIAVDNLADAESLTSAQKEEEEEKERKKLARTASPEKKQELVEKPAVGESKEEKIELKSITADGESPPATKINMDDLQPNENEDKSPYPNPETTGEEDEEEPEMPVGPRPRPLSELHLKEKAVPMPEASAFFIFSSNNRFRLQCHRIVNDTIFTNLILFFILLSSISLAAEDPVQHTSFRNHILFYFDIVFTTIFTIEIALKILGNADYVFTSIFTLEIILKMTAYGAFLHKGSFCRNYFNILDLLVVSVSLISFGIQSSAINVVKILRVLRVLRPLRAINRAKGLKHVVQCVFVAIRTIGNIVIVTTLLQFMFACIGVQLFKGKLYTCSDSSKQTEAECKGNYITYKDGEVDHPIIQPRSWENSKFDFDNVLAAMMALFTVSTFEGWPELLYRSIDSHTEDKGPIYNYRVEISIFFIIYIIIIAFFMMNIFVGFVIVTFQEQGEQEYKNCELDKNQRQCVEYALKARPLRRYIPKNQHQYKVWYVVNSTYFEYLMFVLILLNTICLAMQHYGQSCLFKIAMNILNMLFTGLFTVEMILKLIAFKPKHYFCDAWNTFDALIVVGSIVDIAITEVNPAEHTQCSPSMNAEENSRISITFFRLFRVMRLVKLLSRGEGIRTLLWTFIKSFQALPYVALLIVMLFFIYAVIGMQVFGKIALNDTTEINRNNNFQTFPQAVLLLFRCATGEAWQDIMLACMPGKKCAPESEPSNSTEGETPCGSSFAVFYFISFYMLCAFLIINLFVAVIMDNFDYLTRDWSILGPHHLDEFKRIWAEYDPEAKGRIKHLDVVTLLRRIQPPLGFGKLCPHRVACKRLVSMNMPLNSDGTVMFNATLFALVRTALRIKTEGNLEQANEELRAIIKKIWKRTSMKLLDQVVPPAGDDEVTVGKFYATFLIQEYFRKFKKRKEQGLVGKPSQRNALSLQAGLRTLHDIGPEIRRAISGDLTAEEELDKAMKEAVSAASEDDIFRRAGGLFGNHVSYYQSDGRSAFPQTFTTQRPLHINKAGSSQGDTESPSHEKLVDSTFTPSSYSSTGSNANINNANNTALGRLPRPAGYPSTVSTVEGHGPPLSPAIRVQEVAWKLSSNRCHSRESQAAMAGQEETSQDETYEVKMNHDTEACSEPSLLSTEMLSYQDDENRQLTLPEEDKRDIRQSPKRGFLRSASLGRRASFHLECLKRQKDRGGDISQKTVLPLHLVHHQALAVAGLSPLLQRSHSPASFPRPFATPPATPGSRGWPPQPVPTLRLEGVESSEKLNSSFPSIHCGSWAETTPGGGGSSAARRVRPVSLMVPSQAGAPGRQFHGSASSLVEAVLISEGLGQFAQDPKFIEVTTQELADACDMTIEEMESAADNILSGGAPQSPNGALLPFVNCRDAGQDRAGGEEDAGCVRARGRPSEEELQDSRVYVSSL

SEQ ID NO: 16 - DNA, 13537 bp, Homo sapiens
  ref <308>: DATABASE ACCESSION NUMBER: NCBI / NM_001129833.1
  ref <309>: DATABASE ENTRY DATE: 2014-05-14
  ref <313>: RELEVANT RESIDUES IN SEQ ID NO: (1)..(13537)
ttattttttcaaatggtgtagccgccggaggtgcggtgctcagttcttggaaggggcccggatgtactgaggatgcgttacagtttcactcgaggaggcagtagtggaaaggagcagtttttggggtttgatgccataatgggaatcaggtaatcgtcggcggggaagaagaaacgctgcagaccacggcttcctcgaatcttgcgcgaaagccgccggcctcggaggagggattaatccagacccgccggggggtgttttcacatttcttcctcttcgtggctgctcctcctattaaaaccatttttggtccatggtcaatgagaatacgaggatgtacattccagaggaaaaccaccaaggttccaactatgggagcccacgccccgcccatgccaacatgaatgccaatgcggcagcggggctggcccctgagcacatccccaccccgggggctgccctgtcgtggcaggcggccatcgacgcagcccggcaggctaagctgatgggcagcgctggcaatgcgaccatctccacagtcagctccacgcagcggaagcggcagcaatatgggaaacccaagaagcagggcagcaccacggccacacgcccgccccgagccctgctctgcctgaccctgaagaaccccatccggagggcctgcatcagcattgtcgaatggaaaccatttgaaataattattttactgactatttttgccaattgtgtggccttagcgatctatattccctttccagaagatgattccaacgccaccaattccaacctggaacgagtggaatatctctttctcataatttttacggtggaagcgtttttaaaagtaatcgcctatggactcctctttcaccccaatgcctacctccgcaacggctggaacctactagattttataattgtggttgtggggctttttagtgcaattttagaacaagcaaccaaagcagatggggcaaacgctctcggagggaaaggggccggatttgatgtgaaggcgctgagggccttccgcgtgctgcgccccctgcggctggtgtccggagtcccaagtctccaggtggtcctgaattccatcatcaaggccatggtccccctgctgcacatcgccctgcttgtgctgtttgtcatcatcatctacgccatcatcggcttggagctcttcatggggaagatgcacaagacctgctacaaccaggagggcatagcagatgttccagcagaagatgacccttccccttgtgcgctggaaacgggccacgggcggcagtgccagaacggcacggtgtgcaagcccggctgggatggtcccaagcacggcatcaccaactttgacaactttgccttcgccatgctcacggtgttccagtgcatcaccatggagggctggacggacgtgctgtactgggtcaatgatgccgtaggaagggactggccctggatctattttgttacactaatcatcatagggtcattttttgtacttaacttggttctcggtgtgcttagcggagagttttccaaagagagggagaaggccaaggcccggggagatttccagaagctgcgggagaagcagcagctagaagaggatctcaaaggctacctggattggatcactcaggccgaagacatcgatcctgagaatgaggacgaaggcatggatgaggagaagccccgaaacatgagcatgcccaccagtgagaccgagtccgtcaacaccgaaaacgtggctggaggtgacatcgagggagaaaactgcggggccaggctggcccaccggatctccaagtcaaagttcagccgctactggcgccggtggaatcggttctgcagaaggaagtgccgcgccgcagtcaagtctaatgtcttctactggctggtgattttcctggtgttcctcaacacgctcaccattgcctctgagcactacaaccagcccaactggctcacagaagtccaagacacggcaaacaaggccctgctggccctgttcacggcagagatgctcctgaagatgtacagcctgggcctgcaggcctacttcgtgtccctcttcaaccgctttgactgcttcgtcgtgtgtggcggcatcctggagaccatcctggtggagaccaagatcatgtccccactgggcatctccgtgctcagatgcgtccggctgctgaggattttcaagatcacgaggtactggaactccttgagcaacctggtggcatccttgctgaactctgtgcgctccatcgcctccctgctccttctcctcttcctcttcatcatcatcttctccctcctggggatgcagctctttggaggaaagttcaactttgatgagatgcagacccggaggagcacattcgataacttcccccagtccctcctcactgtgtttcagatcctgaccggggaggactggaattcggtgatgtatgatgggatcatggcttatggcggcccctcttttccagggatgttagtctgtatttacttcatcatcctcttcatctgtggaaactatatcctactgaatgtgttcttggccattgctgtggacaacctggctgatgctgagagcctcacatctgcccaaaaggaggaggaagaggagaaggagagaaagaagctggccaggactgccagcccagagaagaaacaagagttggtggagaagccggcagtgggggaatccaaggaggagaagattgagctgaaatccatcacggctgacggagagtctccacccgccaccaagatcaacatggatgacctccagcccaatgaaaatgaggataagagcccctaccccaacccagaaactacaggagaagaggatgaggaggagccagagatgcctgtcggccctcgcccacgaccactctctgagcttcaccttaaggaaaaggcagtgcccatgccagaagccagcgcgtttttcatcttcagctctaacaacaggtttcgcctccagtgccaccgcattgtcaatgacacgatcttcaccaacctgatcctcttcttcattctgctcagcagcatttccctggctgctgaggacccggtccagcacacctccttcaggaaccatattctgttttattttgatattgtttttaccaccattttcaccattgaaattgctctgaagatgactgcttatggggctttcttgcacaagggttctttctgccggaactacttcaacatcctggacctgctggtggtcagcgtgtccctcatctcctttggcatccagtccagtgcaatcaatgtcgtgaagatcttgcgagtcctgcgagtactcaggcccctgagggccatcaacagggccaaggggctaaagcatgtggttcagtgtgtgtttgtcgccatccggaccatcgggaacatcgtgattgtcaccaccctgctgcagttcatgtttgcctgcatcggggtccagctcttcaagggaaagctgtacacctgttcagacagttccaagcagacagaggcggaatgcaagggcaactacatcacgtacaaagacggggaggttgaccaccccatcatccaaccccgcagctgggagaacagcaagtttgactttgacaatgttctggcagccatgatggccctcttcaccgtctccaccttcgaagggtggccagagctgctgtaccgctccatcgactcccacacggaagacaagggccccatctacaactaccgtgtggagatctccatcttcttcatcatctacatcatcatcatcgccttcttcatgatgaacatcttcgtgggcttcgtcatcgtcacctttcaggagcagggggagcaggagtacaagaactgtgagctggacaagaaccagcgacagtgcgtggaatacgccctcaaggcccggcccctgcggaggtacatccccaagaaccagcaccagtacaaagtgtggtacgtggtcaactccacctacttcgagtacctgatgttcgtcctcatcctgctcaacaccatctgcctggccatgcagcactacggccagagctgcctgttcaaaatcgccatgaacatcctcaacatgctcttcactggcctcttcaccgtggagatgatcctgaagctcattgccttcaaacccaagggttactttagtgatccctggaatgtttttgacttcctcatcgtaattggcagcataattgacgtcattctcagtgagactaatccagctgaacatacccaatgctctccctctatgaacgcagaggaaaactcccgcatctccatcaccttcttccgcctgttccgggtcatgcgtctggtgaagctgctgagccgtggggagggcatccggacgctgctgtggaccttcatcaagtccttccaggccctgccctatgtggccctcctgatcgtgatgctgttcttcatctacgcggtgatcgggatgcaggtgtttgggaaaattgccctgaatgataccacagagatcaaccggaacaacaactttcagaccttcccccaggccgtgctgctcctcttcaggtgtgccaccggggaggcctggcaggacatcatgctggcctgcatgccaggcaagaagtgtgccccagagtccgagcccagcaacagcacggagggtgaaacaccctgtggtagcagctttgctgtcttctacttcatcagcttctacatgctctgtgccttcctgatcatcaacctctttgtagctgtcatcatggacaactttgactacctgacaagggactggtccatccttggtccccaccacctggatgagtttaaaagaatctgggcagagtatgaccctgaagccaagggtcgtatcaaacacctggatgtggtgaccctcctccggcggattcagccgccactaggttttgggaagctgtgccctcaccgcgtggcttgcaaacgcctggtctccatgaacatgcctctgaacagcgacgggacagtcatgttcaatgccaccctgtttgccctggtcaggacggccctgaggatcaaaacagaagagggacccagcccatcagaggcccaccaaggggctgaggatcctttccgccctgcagggaacctagaacaagccaatgaggagctgcgggcgatcatcaagaagatctggaagcggaccagcatgaagctgctggaccaggtggtgccccctgcaggtgatgatgaggtcaccgttggcaagttctacgccacgttcctgatccaggagtacttccggaagttcaagaagcgcaaagagcagggccttgtgggcaagccctcccagaggaacgcgctgtctctgcaggctggcttgcgcacactgcatgacatcgggcctgagatccgacgggccatctctggagatctcaccgctgaggaggagctggacaaggccatgaaggaggctgtgtccgctgcttctgaagatgacatcttcaggagggccggtggcctgttcggcaaccacgtcagctactaccaaagcgacggccggagcgccttcccccagaccttcaccactcagcgcccgctgcacatcaacaaggcgggcagcagccagggcgacactgagtcgccatcccacgagaagctggtggactccaccttcaccccgagcagctactcgtccaccggctccaacgccaacatcaacaacgccaacaacaccgccctgggtcgcctccctcgccccgccggctaccccagcacggtcagcactgtggagggccacgggccccccttgtcccctgccatccgggtgcaggaggtggcgtggaagctcagctccaacaggtgccactcccgggagagccaggcagccatggcgggtcaggaggagacgtctcaggatgagacctatgaagtgaagatgaaccatgacacggaggcctgcagtgagcccagcctgctctccacagagatgctctcctaccaggatgacgaaaatcggcaactgacgctcccagaggaggacaagagggacatccggcaatctccgaagaggggtttcctccgctctgcctcactaggtcgaagggcctccttccacctggaatgtctgaagcgacagaaggaccgagggggagacatctctcagaagacagtcctgcccttgcatctggttcatcatcaggcattggcagtggcaggcctgagccccctcctccagagaagccattcccctgcctcattccctaggccttttgccaccccaccagccacacctggcagccgaggctggcccccacagcccgtccccaccctgcggcttgagggggtcgagtccagtgagaaactcaacagcagcttcccatccatccactgcggctcctgggctgagaccacccccggtggcgggggcagcagcgccgcccggagagtccggcccgtctccctcatggtgcccagccaggctggggccccagggaggcagttccacggcagtgccagcagcctggtggaagcggtcttgatttcagaaggactggggcagtttgctcaagatcccaagttcatcgaggtcaccacccaggagctggccgacgcctgcgacatgaccatagaggagatggagagcgcggccgacaacatcctcagcgggggcgccccacagagccccaatggcgccctcttaccctttgtgaactgcagggacgcggggcaggaccgagccgggggcgaagaggacgcgggctgtgtgcgcgcgcggggtcgaccgagtgaggaggagctccaggacagcagggtctacgtcagcagcctgtagtgggcgctgccagatgcgggcttttttttatttgtttcaatgttcctaatgggttcgtttcagaagtgcctcactgttctcgtgacctggagttaaccggaacagcgtcttcattcatttctgttgggaccagacgcggagcctgggtgcgcgagccgccctccgggaggaaggcgcccggctgcgtctgcagaggcggggagaggaggcggcgagggtcccggggcgcgaggaaggcgcctgccctctcccagctcgcaggccccgggcccggccgcgcctccgcggggagagcaccccggcttcccgcgcgccctcaccaaaaggaccctacagcaaacgggtgtctttcgactctgcttgtagaaaccatttgcacatattctgtacgagcctcgctgtctccctagagccagggccctgcggatttggagaagggagcggggcaggacttccaggaggaccccaacccggcccggagagggaggaggaggcctccaggggcgcggagctctggggatgggcgtcgggccggcagtggtgcggctcactccgtccctgcccacctgcgacgggatcccccgaccggcacgggccacgccgagctcccggccagccgccggcccgcaggcagcgcgagggaggagctgcgccgccggctccgcccaaccaggtggtgctgagcttccgctgagcgctcttttgttttgtggtttgacacttttcttgacagcatgttgcagtttcttttcggttttggttttttttaaatgttttattttgctttcccagcgggaggggaggaagaagagtgtttacaaagtcctgtagccccctcacctttctgttttcacttttgccaatgtacatcgggtttggttttcttgtattatttaaacggttgtggtttcctttttccacggaggttcaatagaagccgctgcaggagagttttaccaaccattgtgtatgcccaataatttgttatcatttccttaggtagtaacctatttttgttctggtttggttcggttatctaatggaaaggtaactggcaatgcacttgatgtggtcttgcacatgtgggtgatagagttgggttcctttttatgctgggtgtacaggtgggtttgggagagaggagcatgcgcgagagagtctccgagtgtgtgcgacgcgtgtgtgtgtggtgggttgtctgtgtgcatatgtcctgcccgtgtatatgcacccacaccatgtgcccgtgcacaccagtgactacgcagtcccccctttctggtttagctgtgggaagatctgaatctggggccgtttgaaagcaaaaacaaaccactgtctctgcttctgaaacgggaatcagtaactctttgcattttctgtcccacaagatatgcaaaaacaatgcaataatattcatttaaaaatacaattgtgagttgtgttggcattaaaactgtattttaaaaaaagacagaaatttaagggaaaaacacaagaaggcattttgcttcaatatattccgtgtaatgttttattgcattgataatgtttctgttgaagaaaccgttatacttgaattcaggtcagtttcagtatttttcaaatatttttttaaaactgaattgcaattgtgccaagcgaatataatgaattgaattaagttggttttcggattcacttcttgtatattttgctgcatgtaaagtaaatcattttgtatttggagtgtgacaagctttacctttgaactcaagtgcttttctatatgtggttgggggaaagggaacaagttttctttagtttgcacaatgagcaaaggtatcaccagtgtagtcattattctgctctccacaaacaggtttggacattactgttttgcatatcttgtgtttgcttacatttccctcaatttttccaaaatcgtttgctgggtatgtttgtaccgcctcttgctgtgagagaccaggacctattttattccagtcttcactctgtccactctgctctggtcatctgatttggtacttctccaagaacagcccttcactgtgaggtgcagggaggcgttctgatgagccctcagtcactgggccgtcatccgcatcccccatggaagaggtagctggctttcccttcccttccaccacacggaattttctctttggcttccttaggaaagtgtacactaaccgggaggataaaattaaagtcaggctgcttggagggaggggcatcctcacttccggattcttgttgctctacccaacaaggacagcaggggctcgagaaaggaactggtgaaaccctgatccatctgaaagtcaactctgcgtgctcctttctccatcccttcctcactctggagcagcctttccttcaggcttgccctaatgtttgggctgccggggagggggccaggacaagggaagaggcatccggagctcacagtgggggtgggaacagatttttgtgggggcatctctaatgctcacttatatctccctagaacatcactcttttggtgctgtgtccttcaaatgtatgtcaacagtggtggctgaaaagggactgctttggggaaaacaggacccaaccattcacccagaattgacccattaaatctcttccagtcctagtgttccctgagcccctcttggcacatatataagtaagctagaaattacaataagggacagtccattcctctatgacagcttgctggactgattcatgacaaagtggagaaatgtactcaatactccccggttaacacagtctagaaacagagtttctttatggatatccacacccaagtcatccaaactttcttgattccttttcactgccatcaaggtcctctagaaattgagtttaggtatcatcctttgaaaagttcccaagatttctaccaggaggtacacacaggcgttccctgtctagggcaggaggactatcctagcttgaccttctgatccactagaataagactggcgtatgatgcctgtcatcagaacagactggcacaagtagtgacatcaatgaaccacagcacaatcttccaagtgatgtctactctccacctaaaatggaattttccccatgaccttgtaaaacataattgtcacatcttccatacccctcctgacagcccccaagtgtcaggagaaaacagtcaggggctaagggcccaagggacttgaagaaacaacagtttaaggtctgcagtttggtcaacttaattcttgtcctccgaccagccctgcctctttcatttccagaccttggagaatttttcccagctttgattcagaaggtactagttataacccctttccttcttcttaatccaataggcctcactctcactgggaaatccactcaaaggaacaaggcaatgtctctcattctatttcccagttccaaattccaggtgcttgtctggagtgaagctacccgttactttctcccagcttttctccacccagcatgtctcctgcccatgcagctgaagacagtggggcaacctcaggagaagcagacctttccatgcccaagttcatctcctgagcaacagtgacacctagaaaatgaggactttggaagtcacccaaaagatggtggctactttatggagtcctgaagatacacagccaccactcctaaaggcaaagaaagaaaacacgaatgtaggtcagggatagagtggaaccctggtcatcggggtttttagcctcatcgtgggaaaggtggtaaaggaggatgatggcatctccatccctagaggccaagaattgaaatatcattgtcaaggattagaaacaattcagcaaagaggccacaaaaagggcctgctgactcccagaagacctctttaaaccccaggggaggcaaatacttgctgatggagtctgggccgtttccatattttaaagaagacctgcctctggggcaaatgtcagcacagagaggactgggaggagaatggaggcaagaaaagggcatattttgactccctctgtgcctcttcccagttcatggaaggatgtgttcagcttacccacccacagtgaccagtgtggtggagccgctgacatctcaaggatctatttgggaaggtgagaagagtactcattccatctgggggtgttgttccagccacatcagcctacctggtgggatgtgggggtgtctgccaccctgtcccccctctgctgatgtccctcccctcaggctgtccaggtgccacctgacacaggctgctgtgcaaagacaggcggggaagcccaaacctcactcccagggaggccctcagccgccagagtccaggttctccagaggctacgatttgaggaggttgagggggaagacaggagggaaagaaaagtcctacaactgtcaggaatggggcacctttccctgtccctaagcaaagctccctcttcccactgccctccccagccccagctccctgtcctccccaacacctagtgagaaagacggtgcgtggaagggagtcccatgggcagatgcttacacgacctctttgtgaagcctcttctgggtttaacttcattcatcaatttattcttatgtcaaagcaatgaaacttttctttctggagccagataccaatacaacaggtgaacgggtttctgccacatctctacattgacgggggatgcttgaacaacccccctcactacacagacacacaccgttaaggcacaagggctggggttgagctctagatgagggactttcctgctcctgcaagggtgagcactgtatacacagacaaggagggtgcagtagagtgactcccttggatggaagtagtaccatcagaacctactattattatgacataaattctatttacatacattgagagaatactacaatcaacactttttcctgggatgactttaagaggtttgagccacagcacctgaagtggcaaagatccatggtctttgtagggtattagagaactcttccagtcacctctgaaagcactctagatcttgcagctgagtggatgaagtgtaacaaatctgttgcacgctgagaggagtcagaattagcatttttcatgaaagttccccacgtctctactaagaatgaggaagaaaagactaagactaggtaattacacagaggcttgaaatgttacatcaccagagccaagtcctctcccttcagatcagttactggctgctacacagggacacccccaccttttcagggcatcccatgcactccacttctcaggatctaaggaatttgactttgtagggatcccagaaagggcactgtgccacttcccctggtgtgaatcagacatacattgtacattcatttctaaaattcactcatgcacctcaaaccaaggtcattatccaaaaaaaaaaaaaaaaagctctgggtggaagagtttgtaagttttaagagagggtcatttctatgtgaggaaatgcagaaatggacagaatgattcttattcactgtttgggtctggagaattcccattgtggaaatcttagagatctcaagtttattaccaagggaataaggaaaaaaaggtgagcaggcaccaggccaagcagtggctcccttgccaaggaacctgaggctgcaggtttcagggacccccttgaagaaacctctcctggccattggccaggagaaaagagaagtctctcctgtagagtcacaagagaagcaaaagagggtgggtcactgggtcctggacatagcccccaaccccaagacttcccaatatggagaaactacaccaatgtttaaaaggggaaaaggaaagaacttgtacatcaagggaagatgatttgtaaacacacagtcctgtgcagaaagatccccttcaggaggtgtctccagcatcccaaagctgtgcgcaccttctcttttcctgcctcaggccacctatgcatccagctgcagcccatacccacacctgaaatccatctcttgaatcccagccaggttatataccaccccattgccatgtcctgtcctggccagaatgcatgctgttcccccaagcctcgtgggagtgaggccatgggaaacagagatgagcatgtctggacaagtctgtgatggtagtggatgagaataacccatggcaaaacacgcacattcattaagaaatagggcgacagattccccgttggtgaagcactgaaaggtctattactctcataatattgctgttttattttaatccaccagagctaccatgcaaaactttcctcctgtgaaacgctccagataaagctcctctaatctccccttccctcatgtcctccagctcaaacccaccttcatcccccaaaccaatctgtatcatgcctgttatcagagaggcacagaaagatgggcagtgcctccgttgtcaccattccccacacccctacacacccccacaccctcccctccaggctccacgacttcacagtcttactgttgtaaatatcattgtacagtttgtaatcctcaaataatcccattgtcagaggcctcgcctgatgggccttctcaccctcgagaaaggccagggaatctagaaggggcaacccttcaaggagagcttcagggtcatctctgtgtgagacactattgtatattcctgtaagattgcatttttatctaaggaatgatgttatttaaaaaacaaacaaaaaacacaaaaaataagaattgcaaataaatttcttaacaatgtct

SEQ ID NO: 17 - protein, 2157 aa, Homo sapiens
  ref <308>: DATABASE ACCESSION NUMBER: NCBI / NP_001123305.1
  ref <309>: DATABASE ENTRY DATE: 2014-05-14
  ref <313>: RELEVANT RESIDUES IN SEQ ID NO: (1)..(2157)
MVNENTRMYIPEENHQGSNYGSPRPAHANMNANAAAGLAPEHIPTPGAALSWQAAIDAARQAKLMGSAGNATISTVSSTQRKRQQYGKPKKQGSTTATRPPRALLCLTLKNPIRRACISIVEWKPFEIIILLTIFANCVALAIYIPFPEDDSNATNSNLERVEYLFLIIFTVEAFLKVIAYGLLFHPNAYLRNGWNLLDFIIVVVGLFSAILEQATKADGANALGGKGAGFDVKALRAFRVLRPLRLVSGVPSLQVVLNSIIKAMVPLLHIALLVLFVIIIYAIIGLELFMGKMHKTCYNQEGIADVPAEDDPSPCALETGHGRQCQNGTVCKPGWDGPKHGITNFDNFAFAMLTVFQCITMEGWTDVLYWVNDAVGRDWPWIYFVTLIIIGSFFVLNLVLGVLSGEFSKEREKAKARGDFQKLREKQQLEEDLKGYLDWITQAEDIDPENEDEGMDEEKPRNMSMPTSETESVNTENVAGGDIEGENCGARLAHRISKSKFSRYWRRWNRFCRRKCRAAVKSNVFYWLVIFLVFLNTLTIASEHYNQPNWLTEVQDTANKALLALFTAEMLLKMYSLGLQAYFVSLFNRFDCFVVCGGILETILVETKIMSPLGISVLRCVRLLRIFKITRYWNSLSNLVASLLNSVRSIASLLLLLFLFIIIFSLLGMQLFGGKFNFDEMQTRRSTFDNFPQSLLTVFQILTGEDWNSVMYDGIMAYGGPSFPGMLVCIYFIILFICGNYILLNVFLAIAVDNLADAESLTSAQKEEEEEKERKKLARTASPEKKQELVEKPAVGESKEEKIELKSITADGESPPATKINMDDLQPNENEDKSPYPNPETTGEEDEEEPEMPVGPRPRPLSELHLKEKAVPMPEASAFFIFSSNNRFRLQCHRIVNDTIFTNLILFFILLSSISLAAEDPVQHTSFRNHILFYFDIVFTTIFTIEIALKMTAYGAFLHKGSFCRNYFNILDLLVVSVSLISFGIQSSAINVVKILRVLRVLRPLRAINRAKGLKHVVQCVFVAIRTIGNIVIVTTLLQFMFACIGVQLFKGKLYTCSDSSKQTEAECKGNYITYKDGEVDHPIIQPRSWENSKFDFDNVLAAMMALFTVSTFEGWPELLYRSIDSHTEDKGPIYNYRVEISIFFIIYIIIIAFFMMNIFVGFVIVTFQEQGEQEYKNCELDKNQRQCVEYALKARPLRRYIPKNQHQYKVWYVVNSTYFEYLMFVLILLNTICLAMQHYGQSCLFKIAMNILNMLFTGLFTVEMILKLIAFKPKGYFSDPWNVFDFLIVIGSIIDVILSETNPAEHTQCSPSMNAEENSRISITFFRLFRVMRLVKLLSRGEGIRTLLWTFIKSFQALPYVALLIVMLFFIYAVIGMQVFGKIALNDTTEINRNNNFQTFPQAVLLLFRCATGEAWQDIMLACMPGKKCAPESEPSNSTEGETPCGSSFAVFYFISFYMLCAFLIINLFVAVIMDNFDYLTRDWSILGPHHLDEFKRIWAEYDPEAKGRIKHLDVVTLLRRIQPPLGFGKLCPHRVACKRLVSMNMPLNSDGTVMFNATLFALVRTALRIKTEEGPSPSEAHQGAEDPFRPAGNLEQANEELRAIIKKIWKRTSMKLLDQVVPPAGDDEVTVGKFYATFLIQEYFRKFKKRKEQGLVGKPSQRNALSLQAGLRTLHDIGPEIRRAISGDLTAEEELDKAMKEAVSAASEDDIFRRAGGLFGNHVSYYQSDGRSAFPQTFTTQRPLHINKAGSSQGDTESPSHEKLVDSTFTPSSYSSTGSNANINNANNTALGRLPRPAGYPSTVSTVEGHGPPLSPAIRVQEVAWKLSSNRCHSRESQAAMAGQEETSQDETYEVKMNHDTEACSEPSLLSTEMLSYQDDENRQLTLPEEDKRDIRQSPKRGFLRSASLGRRASFHLECLKRQKDRGGDISQKTVLPLHLVHHQALAVAGLSPLLQRSHSPASFPRPFATPPATPGSRGWPPQPVPTLRLEGVESSEKLNSSFPSIHCGSWAETTPGGGGSSAARRVRPVSLMVPSQAGAPGRQFHGSASSLVEAVLISEGLGQFAQDPKFIEVTTQELADACDMTIEEMESAADNILSGGAPQSPNGALLPFVNCRDAGQDRAGGEEDAGCVRARGRPSEEELQDSRVYVSSL

SEQ ID NO: 18 - DNA, 13537 bp, Homo sapiens
  ref <308>: DATABASE ACCESSION NUMBER: NCBI / NM_001129834.1
  ref <309>: DATABASE ENTRY DATE: 2014-05-14
  ref <313>: RELEVANT RESIDUES IN SEQ ID NO: (1)..(13537)
ttattttttcaaatggtgtagccgccggaggtgcggtgctcagttcttggaaggggcccggatgtactgaggatgcgttacagtttcactcgaggaggcagtagtggaaaggagcagtttttggggtttgatgccataatgggaatcaggtaatcgtcggcggggaagaagaaacgctgcagaccacggcttcctcgaatcttgcgcgaaagccgccggcctcggaggagggattaatccagacccgccggggggtgttttcacatttcttcctcttcgtggctgctcctcctattaaaaccatttttggtccatggtcaatgagaatacgaggatgtacattccagaggaaaaccaccaaggttccaactatgggagcccacgccccgcccatgccaacatgaatgccaatgcggcagcggggctggcccctgagcacatccccaccccgggggctgccctgtcgtggcaggcggccatcgacgcagcccggcaggctaagctgatgggcagcgctggcaatgcgaccatctccacagtcagctccacgcagcggaagcggcagcaatatgggaaacccaagaagcagggcagcaccacggccacacgcccgccccgagccctgctctgcctgaccctgaagaaccccatccggagggcctgcatcagcattgtcgaatggaaaccatttgaaataattattttactgactatttttgccaattgtgtggccttagcgatctatattccctttccagaagatgattccaacgccaccaattccaacctggaacgagtggaatatctctttctcataatttttacggtggaagcgtttttaaaagtaatcgcctatggactcctctttcaccccaatgcctacctccgcaacggctggaacctactagattttataattgtggttgtggggctttttagtgcaattttagaacaagcaaccaaagcagatggggcaaacgctctcggagggaaaggggccggatttgatgtgaaggcgctgagggccttccgcgtgctgcgccccctgcggctggtgtccggagtcccaagtctccaggtggtcctgaattccatcatcaaggccatggtccccctgctgcacatcgccctgcttgtgctgtttgtcatcatcatctacgccatcatcggcttggagctcttcatggggaagatgcacaagacctgctacaaccaggagggcatagcagatgttccagcagaagatgacccttccccttgtgcgctggaaacgggccacgggcggcagtgccagaacggcacggtgtgcaagcccggctgggatggtcccaagcacggcatcaccaactttgacaactttgccttcgccatgctcacggtgttccagtgcatcaccatggagggctggacggacgtgctgtactgggtcaatgatgccgtaggaagggactggccctggatctattttgttacactaatcatcatagggtcattttttgtacttaacttggttctcggtgtgcttagcggagagttttccaaagagagggagaaggccaaggcccggggagatttccagaagctgcgggagaagcagcagctagaagaggatctcaaaggctacctggattggatcactcaggccgaagacatcgatcctgagaatgaggacgaaggcatggatgaggagaagccccgaaacatgagcatgcccaccagtgagaccgagtccgtcaacaccgaaaacgtggctggaggtgacatcgagggagaaaactgcggggccaggctggcccaccggatctccaagtcaaagttcagccgctactggcgccggtggaatcggttctgcagaaggaagtgccgcgccgcagtcaagtctaatgtcttctactggctggtgattttcctggtgttcctcaacacgctcaccattgcctctgagcactacaaccagcccaactggctcacagaagtccaagacacggcaaacaaggccctgctggccctgttcacggcagagatgctcctgaagatgtacagcctgggcctgcaggcctacttcgtgtccctcttcaaccgctttgactgcttcgtcgtgtgtggcggcatcctggagaccatcctggtggagaccaagatcatgtccccactgggcatctccgtgctcagatgcgtccggctgctgaggattttcaagatcacgaggtactggaactccttgagcaacctggtggcatccttgctgaactctgtgcgctccatcgcctccctgctccttctcctcttcctcttcatcatcatcttctccctcctggggatgcagctctttggaggaaagttcaactttgatgagatgcagacccggaggagcacattcgataacttcccccagtccctcctcactgtgtttcagatcctgaccggggaggactggaattcggtgatgtatgatgggatcatggcttatggcggcccctcttttccagggatgttagtctgtatttacttcatcatcctcttcatctgtggaaactatatcctactgaatgtgttcttggccattgctgtggacaacctggctgatgctgagagcctcacatctgcccaaaaggaggaggaagaggagaaggagagaaagaagctggccaggactgccagcccagagaagaaacaagagttggtggagaagccggcagtgggggaatccaaggaggagaagattgagctgaaatccatcacggctgacggagagtctccacccgccaccaagatcaacatggatgacctccagcccaatgaaaatgaggataagagcccctaccccaacccagaaactacaggagaagaggatgaggaggagccagagatgcctgtcggccctcgcccacgaccactctctgagcttcaccttaaggaaaaggcagtgcccatgccagaagccagcgcgtttttcatcttcagctctaacaacaggtttcgcctccagtgccaccgcattgtcaatgacacgatcttcaccaacctgatcctcttcttcattctgctcagcagcatttccctggctgctgaggacccggtccagcacacctccttcaggaaccatattctgttttattttgatattgtttttaccaccattttcaccattgaaattgctctgaagatgactgcttatggggctttcttgcacaagggttctttctgccggaactacttcaacatcctggacctgctggtggtcagcgtgtccctcatctcctttggcatccagtccagtgcaatcaatgtcgtgaagatcttgcgagtcctgcgagtactcaggcccctgagggccatcaacagggccaaggggctaaagcatgtggttcagtgtgtgtttgtcgccatccggaccatcgggaacatcgtgattgtcaccaccctgctgcagttcatgtttgcctgcatcggggtccagctcttcaagggaaagctgtacacctgttcagacagttccaagcagacagaggcggaatgcaagggcaactacatcacgtacaaagacggggaggttgaccaccccatcatccaaccccgcagctgggagaacagcaagtttgactttgacaatgttctggcagccatgatggccctcttcaccgtctccaccttcgaagggtggccagagctgctgtaccgctccatcgactcccacacggaagacaagggccccatctacaactaccgtgtggagatctccatcttcttcatcatctacatcatcatcatcgccttcttcatgatgaacatcttcgtgggcttcgtcatcgtcacctttcaggagcagggggagcaggagtacaagaactgtgagctggacaagaaccagcgacagtgcgtggaatacgccctcaaggcccggcccctgcggaggtacatccccaagaaccagcaccagtacaaagtgtggtacgtggtcaactccacctacttcgagtacctgatgttcgtcctcatcctgctcaacaccatctgcctggccatgcagcactacggccagagctgcctgttcaaaatcgccatgaacatcctcaacatgctcttcactggcctcttcaccgtggagatgatcctgaagctcattgccttcaaacccaagcactatttctgtgatgcatggaatacatttgacgccttgattgttgtgggtagcattgttgatatagcaatcaccgaggtaaacccagctgaacatacccaatgctctccctctatgaacgcagaggaaaactcccgcatctccatcaccttcttccgcctgttccgggtcatgcgtctggtgaagctgctgagccgtggggagggcatccggacgctgctgtggaccttcatcaagtccttccaggccctgccctatgtggccctcctgatcgtgatgctgttcttcatctacgcggtgatcgggatgcaggtgtttgggaaaattgccctgaatgataccacagagatcaaccggaacaacaactttcagaccttcccccaggccgtgctgctcctcttcaggtgtgccaccggggaggcctggcaggacatcatgctggcctgcatgccaggcaagaagtgtgccccagagtccgagcccagcaacagcacggagggtgaaacaccctgtggtagcagctttgctgtcttctacttcatcagcttctacatgctctgtgccttcctgatcatcaacctctttgtagctgtcatcatggacaactttgactacctgacaagggactggtccatccttggtccccaccacctggatgagtttaaaagaatctgggcagagtatgaccctgaagccaagggtcgtatcaaacacctggatgtggtgaccctcctccggcggattcagccgccactaggttttgggaagctgtgccctcaccgcgtggcttgcaaacgcctggtctccatgaacatgcctctgaacagcgacgggacagtcatgttcaatgccaccctgtttgccctggtcaggacggccctgaggatcaaaacagaagagggacccagcccatcagaggcccaccaaggggctgaggatcctttccgccctgcagggaacctagaacaagccaatgaggagctgcgggcgatcatcaagaagatctggaagcggaccagcatgaagctgctggaccaggtggtgccccctgcaggtgatgatgaggtcaccgttggcaagttctacgccacgttcctgatccaggagtacttccggaagttcaagaagcgcaaagagcagggccttgtgggcaagccctcccagaggaacgcgctgtctctgcaggctggcttgcgcacactgcatgacatcgggcctgagatccgacgggccatctctggagatctcaccgctgaggaggagctggacaaggccatgaaggaggctgtgtccgctgcttctgaagatgacatcttcaggagggccggtggcctgttcggcaaccacgtcagctactaccaaagcgacggccggagcgccttcccccagaccttcaccactcagcgcccgctgcacatcaacaaggcgggcagcagccagggcgacactgagtcgccatcccacgagaagctggtggactccaccttcaccccgagcagctactcgtccaccggctccaacgccaacatcaacaacgccaacaacaccgccctgggtcgcctccctcgccccgccggctaccccagcacggtcagcactgtggagggccacgggccccccttgtcccctgccatccgggtgcaggaggtggcgtggaagctcagctccaacaggtgccactcccgggagagccaggcagccatggcgggtcaggaggagacgtctcaggatgagacctatgaagtgaagatgaaccatgacacggaggcctgcagtgagcccagcctgctctccacagagatgctctcctaccaggatgacgaaaatcggcaactgacgctcccagaggaggacaagagggacatccggcaatctccgaagaggggtttcctccgctctgcctcactaggtcgaagggcctccttccacctggaatgtctgaagcgacagaaggaccgagggggagacatctctcagaagacagtcctgcccttgcatctggttcatcatcaggcattggcagtggcaggcctgagccccctcctccagagaagccattcccctgcctcattccctaggccttttgccaccccaccagccacacctggcagccgaggctggcccccacagcccgtccccaccctgcggcttgagggggtcgagtccagtgagaaactcaacagcagcttcccatccatccactgcggctcctgggctgagaccacccccggtggcgggggcagcagcgccgcccggagagtccggcccgtctccctcatggtgcccagccaggctggggccccagggaggcagttccacggcagtgccagcagcctggtggaagcggtcttgatttcagaaggactggggcagtttgctcaagatcccaagttcatcgaggtcaccacccaggagctggccgacgcctgcgacatgaccatagaggagatggagagcgcggccgacaacatcctcagcgggggcgccccacagagccccaatggcgccctcttaccctttgtgaactgcagggacgcggggcaggaccgagccgggggcgaagaggacgcgggctgtgtgcgcgcgcggggtcgaccgagtgaggaggagctccaggacagcagggtctacgtcagcagcctgtagtgggcgctgccagatgcgggcttttttttatttgtttcaatgttcctaatgggttcgtttcagaagtgcctcactgttctcgtgacctggagttaaccggaacagcgtcttcattcatttctgttgggaccagacgcggagcctgggtgcgcgagccgccctccgggaggaaggcgcccggctgcgtctgcagaggcggggagaggaggcggcgagggtcccggggcgcgaggaaggcgcctgccctctcccagctcgcaggccccgggcccggccgcgcctccgcggggagagcaccccggcttcccgcgcgccctcaccaaaaggaccctacagcaaacgggtgtctttcgactctgcttgtagaaaccatttgcacatattctgtacgagcctcgctgtctccctagagccagggccctgcggatttggagaagggagcggggcaggacttccaggaggaccccaacccggcccggagagggaggaggaggcctccaggggcgcggagctctggggatgggcgtcgggccggcagtggtgcggctcactccgtccctgcccacctgcgacgggatcccccgaccggcacgggccacgccgagctcccggccagccgccggcccgcaggcagcgcgagggaggagctgcgccgccggctccgcccaaccaggtggtgctgagcttccgctgagcgctcttttgttttgtggtttgacacttttcttgacagcatgttgcagtttcttttcggttttggttttttttaaatgttttattttgctttcccagcgggaggggaggaagaagagtgtttacaaagtcctgtagccccctcacctttctgttttcacttttgccaatgtacatcgggtttggttttcttgtattatttaaacggttgtggtttcctttttccacggaggttcaatagaagccgctgcaggagagttttaccaaccattgtgtatgcccaataatttgttatcatttccttaggtagtaacctatttttgttctggtttggttcggttatctaatggaaaggtaactggcaatgcacttgatgtggtcttgcacatgtgggtgatagagttgggttcctttttatgctgggtgtacaggtgggtttgggagagaggagcatgcgcgagagagtctccgagtgtgtgcgacgcgtgtgtgtgtggtgggttgtctgtgtgcatatgtcctgcccgtgtatatgcacccacaccatgtgcccgtgcacaccagtgactacgcagtcccccctttctggtttagctgtgggaagatctgaatctggggccgtttgaaagcaaaaacaaaccactgtctctgcttctgaaacgggaatcagtaactctttgcattttctgtcccacaagatatgcaaaaacaatgcaataatattcatttaaaaatacaattgtgagttgtgttggcattaaaactgtattttaaaaaaagacagaaatttaagggaaaaacacaagaaggcattttgcttcaatatattccgtgtaatgttttattgcattgataatgtttctgttgaagaaaccgttatacttgaattcaggtcagtttcagtatttttcaaatatttttttaaaactgaattgcaattgtgccaagcgaatataatgaattgaattaagttggttttcggattcacttcttgtatattttgctgcatgtaaagtaaatcattttgtatttggagtgtgacaagctttacctttgaactcaagtgcttttctatatgtggttgggggaaagggaacaagttttctttagtttgcacaatgagcaaaggtatcaccagtgtagtcattattctgctctccacaaacaggtttggacattactgttttgcatatcttgtgtttgcttacatttccctcaatttttccaaaatcgtttgctgggtatgtttgtaccgcctcttgctgtgagagaccaggacctattttattccagtcttcactctgtccactctgctctggtcatctgatttggtacttctccaagaacagcccttcactgtgaggtgcagggaggcgttctgatgagccctcagtcactgggccgtcatccgcatcccccatggaagaggtagctggctttcccttcccttccaccacacggaattttctctttggcttccttaggaaagtgtacactaaccgggaggataaaattaaagtcaggctgcttggagggaggggcatcctcacttccggattcttgttgctctacccaacaaggacagcaggggctcgagaaaggaactggtgaaaccctgatccatctgaaagtcaactctgcgtgctcctttctccatcccttcctcactctggagcagcctttccttcaggcttgccctaatgtttgggctgccggggagggggccaggacaagggaagaggcatccggagctcacagtgggggtgggaacagatttttgtgggggcatctctaatgctcacttatatctccctagaacatcactcttttggtgctgtgtccttcaaatgtatgtcaacagtggtggctgaaaagggactgctttggggaaaacaggacccaaccattcacccagaattgacccattaaatctcttccagtcctagtgttccctgagcccctcttggcacatatataagtaagctagaaattacaataagggacagtccattcctctatgacagcttgctggactgattcatgacaaagtggagaaatgtactcaatactccccggttaacacagtctagaaacagagtttctttatggatatccacacccaagtcatccaaactttcttgattccttttcactgccatcaaggtcctctagaaattgagtttaggtatcatcctttgaaaagttcccaagatttctaccaggaggtacacacaggcgttccctgtctagggcaggaggactatcctagcttgaccttctgatccactagaataagactggcgtatgatgcctgtcatcagaacagactggcacaagtagtgacatcaatgaaccacagcacaatcttccaagtgatgtctactctccacctaaaatggaattttccccatgaccttgtaaaacataattgtcacatcttccatacccctcctgacagcccccaagtgtcaggagaaaacagtcaggggctaagggcccaagggacttgaagaaacaacagtttaaggtctgcagtttggtcaacttaattcttgtcctccgaccagccctgcctctttcatttccagaccttggagaatttttcccagctttgattcagaaggtactagttataacccctttccttcttcttaatccaataggcctcactctcactgggaaatccactcaaaggaacaaggcaatgtctctcattctatttcccagttccaaattccaggtgcttgtctggagtgaagctacccgttactttctcccagcttttctccacccagcatgtctcctgcccatgcagctgaagacagtggggcaacctcaggagaagcagacctttccatgcccaagttcatctcctgagcaacagtgacacctagaaaatgaggactttggaagtcacccaaaagatggtggctactttatggagtcctgaagatacacagccaccactcctaaaggcaaagaaagaaaacacgaatgtaggtcagggatagagtggaaccctggtcatcggggtttttagcctcatcgtgggaaaggtggtaaaggaggatgatggcatctccatccctagaggccaagaattgaaatatcattgtcaaggattagaaacaattcagcaaagaggccacaaaaagggcctgctgactcccagaagacctctttaaaccccaggggaggcaaatacttgctgatggagtctgggccgtttccatattttaaagaagacctgcctctggggcaaatgtcagcacagagaggactgggaggagaatggaggcaagaaaagggcatattttgactccctctgtgcctcttcccagttcatggaaggatgtgttcagcttacccacccacagtgaccagtgtggtggagccgctgacatctcaaggatctatttgggaaggtgagaagagtactcattccatctgggggtgttgttccagccacatcagcctacctggtgggatgtgggggtgtctgccaccctgtcccccctctgctgatgtccctcccctcaggctgtccaggtgccacctgacacaggctgctgtgcaaagacaggcggggaagcccaaacctcactcccagggaggccctcagccgccagagtccaggttctccagaggctacgatttgaggaggttgagggggaagacaggagggaaagaaaagtcctacaactgtcaggaatggggcacctttccctgtccctaagcaaagctccctcttcccactgccctccccagccccagctccctgtcctccccaacacctagtgagaaagacggtgcgtggaagggagtcccatgggcagatgcttacacgacctctttgtgaagcctcttctgggtttaacttcattcatcaatttattcttatgtcaaagcaatgaaacttttctttctggagccagataccaatacaacaggtgaacgggtttctgccacatctctacattgacgggggatgcttgaacaacccccctcactacacagacacacaccgttaaggcacaagggctggggttgagctctagatgagggactttcctgctcctgcaagggtgagcactgtatacacagacaaggagggtgcagtagagtgactcccttggatggaagtagtaccatcagaacctactattattatgacataaattctatttacatacattgagagaatactacaatcaacactttttcctgggatgactttaagaggtttgagccacagcacctgaagtggcaaagatccatggtctttgtagggtattagagaactcttccagtcacctctgaaagcactctagatcttgcagctgagtggatgaagtgtaacaaatctgttgcacgctgagaggagtcagaattagcatttttcatgaaagttccccacgtctctactaagaatgaggaagaaaagactaagactaggtaattacacagaggcttgaaatgttacatcaccagagccaagtcctctcccttcagatcagttactggctgctacacagggacacccccaccttttcagggcatcccatgcactccacttctcaggatctaaggaatttgactttgtagggatcccagaaagggcactgtgccacttcccctggtgtgaatcagacatacattgtacattcatttctaaaattcactcatgcacctcaaaccaaggtcattatccaaaaaaaaaaaaaaaaagctctgggtggaagagtttgtaagttttaagagagggtcatttctatgtgaggaaatgcagaaatggacagaatgattcttattcactgtttgggtctggagaattcccattgtggaaatcttagagatctcaagtttattaccaagggaataaggaaaaaaaggtgagcaggcaccaggccaagcagtggctcccttgccaaggaacctgaggctgcaggtttcagggacccccttgaagaaacctctcctggccattggccaggagaaaagagaagtctctcctgtagagtcacaagagaagcaaaagagggtgggtcactgggtcctggacatagcccccaaccccaagacttcccaatatggagaaactacaccaatgtttaaaaggggaaaaggaaagaacttgtacatcaagggaagatgatttgtaaacacacagtcctgtgcagaaagatccccttcaggaggtgtctccagcatcccaaagctgtgcgcaccttctcttttcctgcctcaggccacctatgcatccagctgcagcccatacccacacctgaaatccatctcttgaatcccagccaggttatataccaccccattgccatgtcctgtcctggccagaatgcatgctgttcccccaagcctcgtgggagtgaggccatgggaaacagagatgagcatgtctggacaagtctgtgatggtagtggatgagaataacccatggcaaaacacgcacattcattaagaaatagggcgacagattccccgttggtgaagcactgaaaggtctattactctcataatattgctgttttattttaatccaccagagctaccatgcaaaactttcctcctgtgaaacgctccagataaagctcctctaatctccccttccctcatgtcctccagctcaaacccaccttcatcccccaaaccaatctgtatcatgcctgttatcagagaggcacagaaagatgggcagtgcctccgttgtcaccattccccacacccctacacacccccacaccctcccctccaggctccacgacttcacagtcttactgttgtaaatatcattgtacagtttgtaatcctcaaataatcccattgtcagaggcctcgcctgatgggccttctcaccctcgagaaaggccagggaatctagaaggggcaacccttcaaggagagcttcagggtcatctctgtgtgagacactattgtatattcctgtaagattgcatttttatctaaggaatgatgttatttaaaaaacaaacaaaaaacacaaaaaataagaattgcaaataaatttcttaacaatgtct

SEQ ID NO: 19 - protein, 2157 aa, Homo sapiens
  ref <308>: DATABASE ACCESSION NUMBER: NCBI / NP_001123306.1
  ref <309>: DATABASE ENTRY DATE: 2014-05-14
  ref <313>: RELEVANT RESIDUES IN SEQ ID NO: (1)..(2157)
MVNENTRMYIPEENHQGSNYGSPRPAHANMNANAAAGLAPEHIPTPGAALSWQAAIDAARQAKLMGSAGNATISTVSSTQRKRQQYGKPKKQGSTTATRPPRALLCLTLKNPIRRACISIVEWKPFEIIILLTIFANCVALAIYIPFPEDDSNATNSNLERVEYLFLIIFTVEAFLKVIAYGLLFHPNAYLRNGWNLLDFIIVVVGLFSAILEQATKADGANALGGKGAGFDVKALRAFRVLRPLRLVSGVPSLQVVLNSIIKAMVPLLHIALLVLFVIIIYAIIGLELFMGKMHKTCYNQEGIADVPAEDDPSPCALETGHGRQCQNGTVCKPGWDGPKHGITNFDNFAFAMLTVFQCITMEGWTDVLYWVNDAVGRDWPWIYFVTLIIIGSFFVLNLVLGVLSGEFSKEREKAKARGDFQKLREKQQLEEDLKGYLDWITQAEDIDPENEDEGMDEEKPRNMSMPTSETESVNTENVAGGDIEGENCGARLAHRISKSKFSRYWRRWNRFCRRKCRAAVKSNVFYWLVIFLVFLNTLTIASEHYNQPNWLTEVQDTANKALLALFTAEMLLKMYSLGLQAYFVSLFNRFDCFVVCGGILETILVETKIMSPLGISVLRCVRLLRIFKITRYWNSLSNLVASLLNSVRSIASLLLLLFLFIIIFSLLGMQLFGGKFNFDEMQTRRSTFDNFPQSLLTVFQILTGEDWNSVMYDGIMAYGGPSFPGMLVCIYFIILFICGNYILLNVFLAIAVDNLADAESLTSAQKEEEEEKERKKLARTASPEKKQELVEKPAVGESKEEKIELKSITADGESPPATKINMDDLQPNENEDKSPYPNPETTGEEDEEEPEMPVGPRPRPLSELHLKEKAVPMPEASAFFIFSSNNRFRLQCHRIVNDTIFTNLILFFILLSSISLAAEDPVQHTSFRNHILFYFDIVFTTIFTIEIALKMTAYGAFLHKGSFCRNYFNILDLLVVSVSLISFGIQSSAINVVKILRVLRVLRPLRAINRAKGLKHVVQCVFVAIRTIGNIVIVTTLLQFMFACIGVQLFKGKLYTCSDSSKQTEAECKGNYITYKDGEVDHPIIQPRSWENSKFDFDNVLAAMMALFTVSTFEGWPELLYRSIDSHTEDKGPIYNYRVEISIFFIIYIIIIAFFMMNIFVGFVIVTFQEQGEQEYKNCELDKNQRQCVEYALKARPLRRYIPKNQHQYKVWYVVNSTYFEYLMFVLILLNTICLAMQHYGQSCLFKIAMNILNMLFTGLFTVEMILKLIAFKPKHYFCDAWNTFDALIVVGSIVDIAITEVNPAEHTQCSPSMNAEENSRISITFFRLFRVMRLVKLLSRGEGIRTLLWTFIKSFQALPYVALLIVMLFFIYAVIGMQVFGKIALNDTTEINRNNNFQTFPQAVLLLFRCATGEAWQDIMLACMPGKKCAPESEPSNSTEGETPCGSSFAVFYFISFYMLCAFLIINLFVAVIMDNFDYLTRDWSILGPHHLDEFKRIWAEYDPEAKGRIKHLDVVTLLRRIQPPLGFGKLCPHRVACKRLVSMNMPLNSDGTVMFNATLFALVRTALRIKTEEGPSPSEAHQGAEDPFRPAGNLEQANEELRAIIKKIWKRTSMKLLDQVVPPAGDDEVTVGKFYATFLIQEYFRKFKKRKEQGLVGKPSQRNALSLQAGLRTLHDIGPEIRRAISGDLTAEEELDKAMKEAVSAASEDDIFRRAGGLFGNHVSYYQSDGRSAFPQTFTTQRPLHINKAGSSQGDTESPSHEKLVDSTFTPSSYSSTGSNANINNANNTALGRLPRPAGYPSTVSTVEGHGPPLSPAIRVQEVAWKLSSNRCHSRESQAAMAGQEETSQDETYEVKMNHDTEACSEPSLLSTEMLSYQDDENRQLTLPEEDKRDIRQSPKRGFLRSASLGRRASFHLECLKRQKDRGGDISQKTVLPLHLVHHQALAVAGLSPLLQRSHSPASFPRPFATPPATPGSRGWPPQPVPTLRLEGVESSEKLNSSFPSIHCGSWAETTPGGGGSSAARRVRPVSLMVPSQAGAPGRQFHGSASSLVEAVLISEGLGQFAQDPKFIEVTTQELADACDMTIEEMESAADNILSGGAPQSPNGALLPFVNCRDAGQDRAGGEEDAGCVRARGRPSEEELQDSRVYVSSL

SEQ ID NO: 20 - DNA, 13537 bp, Homo sapiens
  ref <308>: DATABASE ACCESSION NUMBER: NCBI / NM_001129835.1
  ref <309>: DATABASE ENTRY DATE: 2014-05-14
  ref <313>: RELEVANT RESIDUES IN SEQ ID NO: (1)..(13537)
ttattttttcaaatggtgtagccgccggaggtgcggtgctcagttcttggaaggggcccggatgtactgaggatgcgttacagtttcactcgaggaggcagtagtggaaaggagcagtttttggggtttgatgccataatgggaatcaggtaatcgtcggcggggaagaagaaacgctgcagaccacggcttcctcgaatcttgcgcgaaagccgccggcctcggaggagggattaatccagacccgccggggggtgttttcacatttcttcctcttcgtggctgctcctcctattaaaaccatttttggtccatggtcaatgagaatacgaggatgtacattccagaggaaaaccaccaaggttccaactatgggagcccacgccccgcccatgccaacatgaatgccaatgcggcagcggggctggcccctgagcacatccccaccccgggggctgccctgtcgtggcaggcggccatcgacgcagcccggcaggctaagctgatgggcagcgctggcaatgcgaccatctccacagtcagctccacgcagcggaagcggcagcaatatgggaaacccaagaagcagggcagcaccacggccacacgcccgccccgagccctgctctgcctgaccctgaagaaccccatccggagggcctgcatcagcattgtcgaatggaaaccatttgaaataattattttactgactatttttgccaattgtgtggccttagcgatctatattccctttccagaagatgattccaacgccaccaattccaacctggaacgagtggaatatctctttctcataatttttacggtggaagcgtttttaaaagtaatcgcctatggactcctctttcaccccaatgcctacctccgcaacggctggaacctactagattttataattgtggttgtggggctttttagtgcaattttagaacaagcaaccaaagcagatggggcaaacgctctcggagggaaaggggccggatttgatgtgaaggcgctgagggccttccgcgtgctgcgccccctgcggctggtgtccggagtcccaagtctccaggtggtcctgaattccatcatcaaggccatggtccccctgctgcacatcgccctgcttgtgctgtttgtcatcatcatctacgccatcatcggcttggagctcttcatggggaagatgcacaagacctgctacaaccaggagggcatagcagatgttccagcagaagatgacccttccccttgtgcgctggaaacgggccacgggcggcagtgccagaacggcacggtgtgcaagcccggctgggatggtcccaagcacggcatcaccaactttgacaactttgccttcgccatgctcacggtgttccagtgcatcaccatggagggctggacggacgtgctgtactgggtcaatgatgccgtaggaagggactggccctggatctattttgttacactaatcatcatagggtcattttttgtacttaacttggttctcggtgtgcttagcggagagttttccaaagagagggagaaggccaaggcccggggagatttccagaagctgcgggagaagcagcagctagaagaggatctcaaaggctacctggattggatcactcaggccgaagacatcgatcctgagaatgaggacgaaggcatggatgaggagaagccccgaaacatgagcatgcccaccagtgagaccgagtccgtcaacaccgaaaacgtggctggaggtgacatcgagggagaaaactgcggggccaggctggcccaccggatctccaagtcaaagttcagccgctactggcgccggtggaatcggttctgcagaaggaagtgccgcgccgcagtcaagtctaatgtcttctactggctggtgattttcctggtgttcctcaacacgctcaccattgcctctgagcactacaaccagcccaactggctcacagaagtccaagacacggcaaacaaggccctgctggccctgttcacggcagagatgctcctgaagatgtacagcctgggcctgcaggcctacttcgtgtccctcttcaaccgctttgactgcttcgtcgtgtgtggcggcatcctggagaccatcctggtggagaccaagatcatgtccccactgggcatctccgtgctcagatgcgtccggctgctgaggattttcaagatcacgaggtactggaactccttgagcaacctggtggcatccttgctgaactctgtgcgctccatcgcctccctgctccttctcctcttcctcttcatcatcatcttctccctcctggggatgcagctctttggaggaaagttcaactttgatgagatgcagacccggaggagcacattcgataacttcccccagtccctcctcactgtgtttcagatcctgaccggggaggactggaattcggtgatgtatgatgggatcatggcttatggcggcccctcttttccagggatgttagtctgtatttacttcatcatcctcttcatctgtggaaactatatcctactgaatgtgttcttggccattgctgtggacaacctggctgatgctgagagcctcacatctgcccaaaaggaggaggaagaggagaaggagagaaagaagctggccaggactgccagcccagagaagaaacaagagttggtggagaagccggcagtgggggaatccaaggaggagaagattgagctgaaatccatcacggctgacggagagtctccacccgccaccaagatcaacatggatgacctccagcccaatgaaaatgaggataagagcccctaccccaacccagaaactacaggagaagaggatgaggaggagccagagatgcctgtcggccctcgcccacgaccactctctgagcttcaccttaaggaaaaggcagtgcccatgccagaagccagcgcgtttttcatcttcagctctaacaacaggtttcgcctccagtgccaccgcattgtcaatgacacgatcttcaccaacctgatcctcttcttcattctgctcagcagcatttccctggctgctgaggacccggtccagcacacctccttcaggaaccatatcctaggcaatgcagactatgtcttcactagtatctttacattagaaattatccttaagatgactgcttatggggctttcttgcacaagggttctttctgccggaactacttcaacatcctggacctgctggtggtcagcgtgtccctcatctcctttggcatccagtccagtgcaatcaatgtcgtgaagatcttgcgagtcctgcgagtactcaggcccctgagggccatcaacagggccaaggggctaaagcatgtggttcagtgtgtgtttgtcgccatccggaccatcgggaacatcgtgattgtcaccaccctgctgcagttcatgtttgcctgcatcggggtccagctcttcaagggaaagctgtacacctgttcagacagttccaagcagacagaggcggaatgcaagggcaactacatcacgtacaaagacggggaggttgaccaccccatcatccaaccccgcagctgggagaacagcaagtttgactttgacaatgttctggcagccatgatggccctcttcaccgtctccaccttcgaagggtggccagagctgctgtaccgctccatcgactcccacacggaagacaagggccccatctacaactaccgtgtggagatctccatcttcttcatcatctacatcatcatcatcgccttcttcatgatgaacatcttcgtgggcttcgtcatcgtcacctttcaggagcagggggagcaggagtacaagaactgtgagctggacaagaaccagcgacagtgcgtggaatacgccctcaaggcccggcccctgcggaggtacatccccaagaaccagcaccagtacaaagtgtggtacgtggtcaactccacctacttcgagtacctgatgttcgtcctcatcctgctcaacaccatctgcctggccatgcagcactacggccagagctgcctgttcaaaatcgccatgaacatcctcaacatgctcttcactggcctcttcaccgtggagatgatcctgaagctcattgccttcaaacccaagcactatttctgtgatgcatggaatacatttgacgccttgattgttgtgggtagcattgttgatatagcaatcaccgaggtaaacccagctgaacatacccaatgctctccctctatgaacgcagaggaaaactcccgcatctccatcaccttcttccgcctgttccgggtcatgcgtctggtgaagctgctgagccgtggggagggcatccggacgctgctgtggaccttcatcaagtccttccaggccctgccctatgtggccctcctgatcgtgatgctgttcttcatctacgcggtgatcgggatgcaggtgtttgggaaaattgccctgaatgataccacagagatcaaccggaacaacaactttcagaccttcccccaggccgtgctgctcctcttcaggtgtgccaccggggaggcctggcaggacatcatgctggcctgcatgccaggcaagaagtgtgccccagagtccgagcccagcaacagcacggagggtgaaacaccctgtggtagcagctttgctgtcttctacttcatcagcttctacatgctctgtgccttcctgatcatcaacctctttgtagctgtcatcatggacaactttgactacctgacaagggactggtccatccttggtccccaccacctggatgagtttaaaagaatctgggcagagtatgaccctgaagccaagggtcgtatcaaacacctggatgtggtgaccctcctccggcggattcagccgccactaggttttgggaagctgtgccctcaccgcgtggcttgcaaacgcctggtctccatgaacatgcctctgaacagcgacgggacagtcatgttcaatgccaccctgtttgccctggtcaggacggccctgaggatcaaaacagaagagggacccagcccatcagaggcccaccaaggggctgaggatcctttccgccctgcagggaacctagaacaagccaatgaggagctgcgggcgatcatcaagaagatctggaagcggaccagcatgaagctgctggaccaggtggtgccccctgcaggtgatgatgaggtcaccgttggcaagttctacgccacgttcctgatccaggagtacttccggaagttcaagaagcgcaaagagcagggccttgtgggcaagccctcccagaggaacgcgctgtctctgcaggctggcttgcgcacactgcatgacatcgggcctgagatccgacgggccatctctggagatctcaccgctgaggaggagctggacaaggccatgaaggaggctgtgtccgctgcttctgaagatgacatcttcaggagggccggtggcctgttcggcaaccacgtcagctactaccaaagcgacggccggagcgccttcccccagaccttcaccactcagcgcccgctgcacatcaacaaggcgggcagcagccagggcgacactgagtcgccatcccacgagaagctggtggactccaccttcaccccgagcagctactcgtccaccggctccaacgccaacatcaacaacgccaacaacaccgccctgggtcgcctccctcgccccgccggctaccccagcacggtcagcactgtggagggccacgggccccccttgtcccctgccatccgggtgcaggaggtggcgtggaagctcagctccaacaggtgccactcccgggagagccaggcagccatggcgggtcaggaggagacgtctcaggatgagacctatgaagtgaagatgaaccatgacacggaggcctgcagtgagcccagcctgctctccacagagatgctctcctaccaggatgacgaaaatcggcaactgacgctcccagaggaggacaagagggacatccggcaatctccgaagaggggtttcctccgctctgcctcactaggtcgaagggcctccttccacctggaatgtctgaagcgacagaaggaccgagggggagacatctctcagaagacagtcctgcccttgcatctggttcatcatcaggcattggcagtggcaggcctgagccccctcctccagagaagccattcccctgcctcattccctaggccttttgccaccccaccagccacacctggcagccgaggctggcccccacagcccgtccccaccctgcggcttgagggggtcgagtccagtgagaaactcaacagcagcttcccatccatccactgcggctcctgggctgagaccacccccggtggcgggggcagcagcgccgcccggagagtccggcccgtctccctcatggtgcccagccaggctggggccccagggaggcagttccacggcagtgccagcagcctggtggaagcggtcttgatttcagaaggactggggcagtttgctcaagatcccaagttcatcgaggtcaccacccaggagctggccgacgcctgcgacatgaccatagaggagatggagagcgcggccgacaacatcctcagcgggggcgccccacagagccccaatggcgccctcttaccctttgtgaactgcagggacgcggggcaggaccgagccgggggcgaagaggacgcgggctgtgtgcgcgcgcggggtcgaccgagtgaggaggagctccaggacagcagggtctacgtcagcagcctgtagtgggcgctgccagatgcgggcttttttttatttgtttcaatgttcctaatgggttcgtttcagaagtgcctcactgttctcgtgacctggagttaaccggaacagcgtcttcattcatttctgttgggaccagacgcggagcctgggtgcgcgagccgccctccgggaggaaggcgcccggctgcgtctgcagaggcggggagaggaggcggcgagggtcccggggcgcgaggaaggcgcctgccctctcccagctcgcaggccccgggcccggccgcgcctccgcggggagagcaccccggcttcccgcgcgccctcaccaaaaggaccctacagcaaacgggtgtctttcgactctgcttgtagaaaccatttgcacatattctgtacgagcctcgctgtctccctagagccagggccctgcggatttggagaagggagcggggcaggacttccaggaggaccccaacccggcccggagagggaggaggaggcctccaggggcgcggagctctggggatgggcgtcgggccggcagtggtgcggctcactccgtccctgcccacctgcgacgggatcccccgaccggcacgggccacgccgagctcccggccagccgccggcccgcaggcagcgcgagggaggagctgcgccgccggctccgcccaaccaggtggtgctgagcttccgctgagcgctcttttgttttgtggtttgacacttttcttgacagcatgttgcagtttcttttcggttttggttttttttaaatgttttattttgctttcccagcgggaggggaggaagaagagtgtttacaaagtcctgtagccccctcacctttctgttttcacttttgccaatgtacatcgggtttggttttcttgtattatttaaacggttgtggtttcctttttccacggaggttcaatagaagccgctgcaggagagttttaccaaccattgtgtatgcccaataatttgttatcatttccttaggtagtaacctatttttgttctggtttggttcggttatctaatggaaaggtaactggcaatgcacttgatgtggtcttgcacatgtgggtgatagagttgggttcctttttatgctgggtgtacaggtgggtttgggagagaggagcatgcgcgagagagtctccgagtgtgtgcgacgcgtgtgtgtgtggtgggttgtctgtgtgcatatgtcctgcccgtgtatatgcacccacaccatgtgcccgtgcacaccagtgactacgcagtcccccctttctggtttagctgtgggaagatctgaatctggggccgtttgaaagcaaaaacaaaccactgtctctgcttctgaaacgggaatcagtaactctttgcattttctgtcccacaagatatgcaaaaacaatgcaataatattcatttaaaaatacaattgtgagttgtgttggcattaaaactgtattttaaaaaaagacagaaatttaagggaaaaacacaagaaggcattttgcttcaatatattccgtgtaatgttttattgcattgataatgtttctgttgaagaaaccgttatacttgaattcaggtcagtttcagtatttttcaaatatttttttaaaactgaattgcaattgtgccaagcgaatataatgaattgaattaagttggttttcggattcacttcttgtatattttgctgcatgtaaagtaaatcattttgtatttggagtgtgacaagctttacctttgaactcaagtgcttttctatatgtggttgggggaaagggaacaagttttctttagtttgcacaatgagcaaaggtatcaccagtgtagtcattattctgctctccacaaacaggtttggacattactgttttgcatatcttgtgtttgcttacatttccctcaatttttccaaaatcgtttgctgggtatgtttgtaccgcctcttgctgtgagagaccaggacctattttattccagtcttcactctgtccactctgctctggtcatctgatttggtacttctccaagaacagcccttcactgtgaggtgcagggaggcgttctgatgagccctcagtcactgggccgtcatccgcatcccccatggaagaggtagctggctttcccttcccttccaccacacggaattttctctttggcttccttaggaaagtgtacactaaccgggaggataaaattaaagtcaggctgcttggagggaggggcatcctcacttccggattcttgttgctctacccaacaaggacagcaggggctcgagaaaggaactggtgaaaccctgatccatctgaaagtcaactctgcgtgctcctttctccatcccttcctcactctggagcagcctttccttcaggcttgccctaatgtttgggctgccggggagggggccaggacaagggaagaggcatccggagctcacagtgggggtgggaacagatttttgtgggggcatctctaatgctcacttatatctccctagaacatcactcttttggtgctgtgtccttcaaatgtatgtcaacagtggtggctgaaaagggactgctttggggaaaacaggacccaaccattcacccagaattgacccattaaatctcttccagtcctagtgttccctgagcccctcttggcacatatataagtaagctagaaattacaataagggacagtccattcctctatgacagcttgctggactgattcatgacaaagtggagaaatgtactcaatactccccggttaacacagtctagaaacagagtttctttatggatatccacacccaagtcatccaaactttcttgattccttttcactgccatcaaggtcctctagaaattgagtttaggtatcatcctttgaaaagttcccaagatttctaccaggaggtacacacaggcgttccctgtctagggcaggaggactatcctagcttgaccttctgatccactagaataagactggcgtatgatgcctgtcatcagaacagactggcacaagtagtgacatcaatgaaccacagcacaatcttccaagtgatgtctactctccacctaaaatggaattttccccatgaccttgtaaaacataattgtcacatcttccatacccctcctgacagcccccaagtgtcaggagaaaacagtcaggggctaagggcccaagggacttgaagaaacaacagtttaaggtctgcagtttggtcaacttaattcttgtcctccgaccagccctgcctctttcatttccagaccttggagaatttttcccagctttgattcagaaggtactagttataacccctttccttcttcttaatccaataggcctcactctcactgggaaatccactcaaaggaacaaggcaatgtctctcattctatttcccagttccaaattccaggtgcttgtctggagtgaagctacccgttactttctcccagcttttctccacccagcatgtctcctgcccatgcagctgaagacagtggggcaacctcaggagaagcagacctttccatgcccaagttcatctcctgagcaacagtgacacctagaaaatgaggactttggaagtcacccaaaagatggtggctactttatggagtcctgaagatacacagccaccactcctaaaggcaaagaaagaaaacacgaatgtaggtcagggatagagtggaaccctggtcatcggggtttttagcctcatcgtgggaaaggtggtaaaggaggatgatggcatctccatccctagaggccaagaattgaaatatcattgtcaaggattagaaacaattcagcaaagaggccacaaaaagggcctgctgactcccagaagacctctttaaaccccaggggaggcaaatacttgctgatggagtctgggccgtttccatattttaaagaagacctgcctctggggcaaatgtcagcacagagaggactgggaggagaatggaggcaagaaaagggcatattttgactccctctgtgcctcttcccagttcatggaaggatgtgttcagcttacccacccacagtgaccagtgtggtggagccgctgacatctcaaggatctatttgggaaggtgagaagagtactcattccatctgggggtgttgttccagccacatcagcctacctggtgggatgtgggggtgtctgccaccctgtcccccctctgctgatgtccctcccctcaggctgtccaggtgccacctgacacaggctgctgtgcaaagacaggcggggaagcccaaacctcactcccagggaggccctcagccgccagagtccaggttctccagaggctacgatttgaggaggttgagggggaagacaggagggaaagaaaagtcctacaactgtcaggaatggggcacctttccctgtccctaagcaaagctccctcttcccactgccctccccagccccagctccctgtcctccccaacacctagtgagaaagacggtgcgtggaagggagtcccatgggcagatgcttacacgacctctttgtgaagcctcttctgggtttaacttcattcatcaatttattcttatgtcaaagcaatgaaacttttctttctggagccagataccaatacaacaggtgaacgggtttctgccacatctctacattgacgggggatgcttgaacaacccccctcactacacagacacacaccgttaaggcacaagggctggggttgagctctagatgagggactttcctgctcctgcaagggtgagcactgtatacacagacaaggagggtgcagtagagtgactcccttggatggaagtagtaccatcagaacctactattattatgacataaattctatttacatacattgagagaatactacaatcaacactttttcctgggatgactttaagaggtttgagccacagcacctgaagtggcaaagatccatggtctttgtagggtattagagaactcttccagtcacctctgaaagcactctagatcttgcagctgagtggatgaagtgtaacaaatctgttgcacgctgagaggagtcagaattagcatttttcatgaaagttccccacgtctctactaagaatgaggaagaaaagactaagactaggtaattacacagaggcttgaaatgttacatcaccagagccaagtcctctcccttcagatcagttactggctgctacacagggacacccccaccttttcagggcatcccatgcactccacttctcaggatctaaggaatttgactttgtagggatcccagaaagggcactgtgccacttcccctggtgtgaatcagacatacattgtacattcatttctaaaattcactcatgcacctcaaaccaaggtcattatccaaaaaaaaaaaaaaaaagctctgggtggaagagtttgtaagttttaagagagggtcatttctatgtgaggaaatgcagaaatggacagaatgattcttattcactgtttgggtctggagaattcccattgtggaaatcttagagatctcaagtttattaccaagggaataaggaaaaaaaggtgagcaggcaccaggccaagcagtggctcccttgccaaggaacctgaggctgcaggtttcagggacccccttgaagaaacctctcctggccattggccaggagaaaagagaagtctctcctgtagagtcacaagagaagcaaaagagggtgggtcactgggtcctggacatagcccccaaccccaagacttcccaatatggagaaactacaccaatgtttaaaaggggaaaaggaaagaacttgtacatcaagggaagatgatttgtaaacacacagtcctgtgcagaaagatccccttcaggaggtgtctccagcatcccaaagctgtgcgcaccttctcttttcctgcctcaggccacctatgcatccagctgcagcccatacccacacctgaaatccatctcttgaatcccagccaggttatataccaccccattgccatgtcctgtcctggccagaatgcatgctgttcccccaagcctcgtgggagtgaggccatgggaaacagagatgagcatgtctggacaagtctgtgatggtagtggatgagaataacccatggcaaaacacgcacattcattaagaaatagggcgacagattccccgttggtgaagcactgaaaggtctattactctcataatattgctgttttattttaatccaccagagctaccatgcaaaactttcctcctgtgaaacgctccagataaagctcctctaatctccccttccctcatgtcctccagctcaaacccaccttcatcccccaaaccaatctgtatcatgcctgttatcagagaggcacagaaagatgggcagtgcctccgttgtcaccattccccacacccctacacacccccacaccctcccctccaggctccacgacttcacagtcttactgttgtaaatatcattgtacagtttgtaatcctcaaataatcccattgtcagaggcctcgcctgatgggccttctcaccctcgagaaaggccagggaatctagaaggggcaacccttcaaggagagcttcagggtcatctctgtgtgagacactattgtatattcctgtaagattgcatttttatctaaggaatgatgttatttaaaaaacaaacaaaaaacacaaaaaataagaattgcaaataaatttcttaacaatgtct

SEQ ID NO: 21 - protein, 2157 aa, Homo sapiens
  ref <308>: DATABASE ACCESSION NUMBER: NCBI / NP_001123307.1
  ref <309>: DATABASE ENTRY DATE: 2014-05-14
  ref <313>: RELEVANT RESIDUES IN SEQ ID NO: (1)..(2157)
MVNENTRMYIPEENHQGSNYGSPRPAHANMNANAAAGLAPEHIPTPGAALSWQAAIDAARQAKLMGSAGNATISTVSSTQRKRQQYGKPKKQGSTTATRPPRALLCLTLKNPIRRACISIVEWKPFEIIILLTIFANCVALAIYIPFPEDDSNATNSNLERVEYLFLIIFTVEAFLKVIAYGLLFHPNAYLRNGWNLLDFIIVVVGLFSAILEQATKADGANALGGKGAGFDVKALRAFRVLRPLRLVSGVPSLQVVLNSIIKAMVPLLHIALLVLFVIIIYAIIGLELFMGKMHKTCYNQEGIADVPAEDDPSPCALETGHGRQCQNGTVCKPGWDGPKHGITNFDNFAFAMLTVFQCITMEGWTDVLYWVNDAVGRDWPWIYFVTLIIIGSFFVLNLVLGVLSGEFSKEREKAKARGDFQKLREKQQLEEDLKGYLDWITQAEDIDPENEDEGMDEEKPRNMSMPTSETESVNTENVAGGDIEGENCGARLAHRISKSKFSRYWRRWNRFCRRKCRAAVKSNVFYWLVIFLVFLNTLTIASEHYNQPNWLTEVQDTANKALLALFTAEMLLKMYSLGLQAYFVSLFNRFDCFVVCGGILETILVETKIMSPLGISVLRCVRLLRIFKITRYWNSLSNLVASLLNSVRSIASLLLLLFLFIIIFSLLGMQLFGGKFNFDEMQTRRSTFDNFPQSLLTVFQILTGEDWNSVMYDGIMAYGGPSFPGMLVCIYFIILFICGNYILLNVFLAIAVDNLADAESLTSAQKEEEEEKERKKLARTASPEKKQELVEKPAVGESKEEKIELKSITADGESPPATKINMDDLQPNENEDKSPYPNPETTGEEDEEEPEMPVGPRPRPLSELHLKEKAVPMPEASAFFIFSSNNRFRLQCHRIVNDTIFTNLILFFILLSSISLAAEDPVQHTSFRNHILGNADYVFTSIFTLEIILKMTAYGAFLHKGSFCRNYFNILDLLVVSVSLISFGIQSSAINVVKILRVLRVLRPLRAINRAKGLKHVVQCVFVAIRTIGNIVIVTTLLQFMFACIGVQLFKGKLYTCSDSSKQTEAECKGNYITYKDGEVDHPIIQPRSWENSKFDFDNVLAAMMALFTVSTFEGWPELLYRSIDSHTEDKGPIYNYRVEISIFFIIYIIIIAFFMMNIFVGFVIVTFQEQGEQEYKNCELDKNQRQCVEYALKARPLRRYIPKNQHQYKVWYVVNSTYFEYLMFVLILLNTICLAMQHYGQSCLFKIAMNILNMLFTGLFTVEMILKLIAFKPKHYFCDAWNTFDALIVVGSIVDIAITEVNPAEHTQCSPSMNAEENSRISITFFRLFRVMRLVKLLSRGEGIRTLLWTFIKSFQALPYVALLIVMLFFIYAVIGMQVFGKIALNDTTEINRNNNFQTFPQAVLLLFRCATGEAWQDIMLACMPGKKCAPESEPSNSTEGETPCGSSFAVFYFISFYMLCAFLIINLFVAVIMDNFDYLTRDWSILGPHHLDEFKRIWAEYDPEAKGRIKHLDVVTLLRRIQPPLGFGKLCPHRVACKRLVSMNMPLNSDGTVMFNATLFALVRTALRIKTEEGPSPSEAHQGAEDPFRPAGNLEQANEELRAIIKKIWKRTSMKLLDQVVPPAGDDEVTVGKFYATFLIQEYFRKFKKRKEQGLVGKPSQRNALSLQAGLRTLHDIGPEIRRAISGDLTAEEELDKAMKEAVSAASEDDIFRRAGGLFGNHVSYYQSDGRSAFPQTFTTQRPLHINKAGSSQGDTESPSHEKLVDSTFTPSSYSSTGSNANINNANNTALGRLPRPAGYPSTVSTVEGHGPPLSPAIRVQEVAWKLSSNRCHSRESQAAMAGQEETSQDETYEVKMNHDTEACSEPSLLSTEMLSYQDDENRQLTLPEEDKRDIRQSPKRGFLRSASLGRRASFHLECLKRQKDRGGDISQKTVLPLHLVHHQALAVAGLSPLLQRSHSPASFPRPFATPPATPGSRGWPPQPVPTLRLEGVESSEKLNSSFPSIHCGSWAETTPGGGGSSAARRVRPVSLMVPSQAGAPGRQFHGSASSLVEAVLISEGLGQFAQDPKFIEVTTQELADACDMTIEEMESAADNILSGGAPQSPNGALLPFVNCRDAGQDRAGGEEDAGCVRARGRPSEEELQDSRVYVSSL

SEQ ID NO: 22 - DNA, 13531 bp, Homo sapiens
  ref <308>: DATABASE ACCESSION NUMBER: NCBI / NM_001129836.1
  ref <309>: DATABASE ENTRY DATE: 2014-05-14
  ref <313>: RELEVANT RESIDUES IN SEQ ID NO: (1)..(13531)
ttattttttcaaatggtgtagccgccggaggtgcggtgctcagttcttggaaggggcccggatgtactgaggatgcgttacagtttcactcgaggaggcagtagtggaaaggagcagtttttggggtttgatgccataatgggaatcaggtaatcgtcggcggggaagaagaaacgctgcagaccacggcttcctcgaatcttgcgcgaaagccgccggcctcggaggagggattaatccagacccgccggggggtgttttcacatttcttcctcttcgtggctgctcctcctattaaaaccatttttggtccatggtcaatgagaatacgaggatgtacattccagaggaaaaccaccaaggttccaactatgggagcccacgccccgcccatgccaacatgaatgccaatgcggcagcggggctggcccctgagcacatccccaccccgggggctgccctgtcgtggcaggcggccatcgacgcagcccggcaggctaagctgatgggcagcgctggcaatgcgaccatctccacagtcagctccacgcagcggaagcggcagcaatatgggaaacccaagaagcagggcagcaccacggccacacgcccgccccgagccctgctctgcctgaccctgaagaaccccatccggagggcctgcatcagcattgtcgaatggaaaccatttgaaataattattttactgactatttttgccaattgtgtggccttagcgatctatattccctttccagaagatgattccaacgccaccaattccaacctggaacgagtggaatatctctttctcataatttttacggtggaagcgtttttaaaagtaatcgcctatggactcctctttcaccccaatgcctacctccgcaacggctggaacctactagattttataattgtggttgtggggctttttagtgcaattttagaacaagcaaccaaagcagatggggcaaacgctctcggagggaaaggggccggatttgatgtgaaggcgctgagggccttccgcgtgctgcgccccctgcggctggtgtccggagtcccaagtctccaggtggtcctgaattccatcatcaaggccatggtccccctgctgcacatcgccctgcttgtgctgtttgtcatcatcatctacgccatcatcggcttggagctcttcatggggaagatgcacaagacctgctacaaccaggagggcatagcagatgttccagcagaagatgacccttccccttgtgcgctggaaacgggccacgggcggcagtgccagaacggcacggtgtgcaagcccggctgggatggtcccaagcacggcatcaccaactttgacaactttgccttcgccatgctcacggtgttccagtgcatcaccatggagggctggacggacgtgctgtactgggtcaatgatgccgtaggaagggactggccctggatctattttgttacactaatcatcatagggtcattttttgtacttaacttggttctcggtgtgcttagcggagagttttccaaagagagggagaaggccaaggcccggggagatttccagaagctgcgggagaagcagcagctagaagaggatctcaaaggctacctggattggatcactcaggccgaagacatcgatcctgagaatgaggacgaaggcatggatgaggagaagccccgaaacatgagcatgcccaccagtgagaccgagtccgtcaacaccgaaaacgtggctggaggtgacatcgagggagaaaactgcggggccaggctggcccaccggatctccaagtcaaagttcagccgctactggcgccggtggaatcggttctgcagaaggaagtgccgcgccgcagtcaagtctaatgtcttctactggctggtgattttcctggtgttcctcaacacgctcaccattgcctctgagcactacaaccagcccaactggctcacagaagtccaagacacggcaaacaaggccctgctggccctgttcacggcagagatgctcctgaagatgtacagcctgggcctgcaggcctacttcgtgtccctcttcaaccgctttgactgcttcgtcgtgtgtggcggcatcctggagaccatcctggtggagaccaagatcatgtccccactgggcatctccgtgctcagatgcgtccggctgctgaggattttcaagatcacgaggtactggaactccttgagcaacctggtggcatccttgctgaactctgtgcgctccatcgcctccctgctccttctcctcttcctcttcatcatcatcttctccctcctggggatgcagctctttggaggaaagttcaactttgatgagatgcagacccggaggagcacattcgataacttcccccagtccctcctcactgtgtttcagatcctgaccggggaggactggaattcggtgatgtatgatgggatcatggcttatggcggcccctcttttccagggatgttagtctgtatttacttcatcatcctcttcatctgtggaaactatatcctactgaatgtgttcttggccattgctgtggacaacctggctgatgctgagagcctcacatctgcccaaaaggaggaggaagaggagaaggagagaaagaagctggccaggactgccagcccagagaagaaacaagagttggtggagaagccggcagtgggggaatccaaggaggagaagattgagctgaaatccatcacggctgacggagagtctccacccgccaccaagatcaacatggatgacctccagcccaatgaaaatgaggataagagcccctaccccaacccagaaactacaggagaagaggatgaggaggagccagagatgcctgtcggccctcgcccacgaccactctctgagcttcaccttaaggaaaaggcagtgcccatgccagaagccagcgcgtttttcatcttcagctctaacaacaggtttcgcctccagtgccaccgcattgtcaatgacacgatcttcaccaacctgatcctcttcttcattctgctcagcagcatttccctggctgctgaggacccggtccagcacacctccttcaggaaccatatcctaggcaatgcagactatgtcttcactagtatctttacattagaaattatccttaagatgactgcttatggggctttcttgcacaagggttctttctgccggaactacttcaacatcctggacctgctggtggtcagcgtgtccctcatctcctttggcatccagtccagtgcaatcaatgtcgtgaagatcttgcgagtcctgcgagtactcaggcccctgagggccatcaacagggccaaggggctaaagcatgtggttcagtgtgtgtttgtcgccatccggaccatcgggaacatcgtgattgtcaccaccctgctgcagttcatgtttgcctgcatcggggtccagctcttcaagggaaagctgtacacctgttcagacagttccaagcagacagaggcggaatgcaagggcaactacatcacgtacaaagacggggaggttgaccaccccatcatccaaccccgcagctgggagaacagcaagtttgactttgacaatgttctggcagccatgatggccctcttcaccgtctccaccttcgaagggtggccagagctgctgtaccgctccatcgactcccacacggaagacaagggccccatctacaactaccgtgtggagatctccatcttcttcatcatctacatcatcatcatcgccttcttcatgatgaacatcttcgtgggcttcgtcatcgtcacctttcaggagcagggggagcaggagtacaagaactgtgagctggacaagaaccagcgacagtgcgtggaatacgccctcaaggcccggcccctgcggaggtacatccccaagaaccagcaccagtacaaagtgtggtacgtggtcaactccacctacttcgagtacctgatgttcgtcctcatcctgctcaacaccatctgcctggccatgcagcactacggccagagctgcctgttcaaaatcgccatgaacatcctcaacatgctcttcactggcctcttcaccgtggagatgatcctgaagctcattgccttcaaacccaagggttactttagtgatccctggaatgtttttgacttcctcatcgtaattggcagcataattgacgtcattctcagtgagactaatcactatttctgtgatgcatggaatacatttgacgccttgattgttgtgggtagcattgttgatatagcaatcaccgaggtaaacaacgcagaggaaaactcccgcatctccatcaccttcttccgcctgttccgggtcatgcgtctggtgaagctgctgagccgtggggagggcatccggacgctgctgtggaccttcatcaagtccttccaggccctgccctatgtggccctcctgatcgtgatgctgttcttcatctacgcggtgatcgggatgcaggtgtttgggaaaattgccctgaatgataccacagagatcaaccggaacaacaactttcagaccttcccccaggccgtgctgctcctcttcaggtgtgccaccggggaggcctggcaggacatcatgctggcctgcatgccaggcaagaagtgtgccccagagtccgagcccagcaacagcacggagggtgaaacaccctgtggtagcagctttgctgtcttctacttcatcagcttctacatgctctgtgccttcctgatcatcaacctctttgtagctgtcatcatggacaactttgactacctgacaagggactggtccatccttggtccccaccacctggatgagtttaaaagaatctgggcagagtatgaccctgaagccaagggtcgtatcaaacacctggatgtggtgaccctcctccggcggattcagccgccactaggttttgggaagctgtgccctcaccgcgtggcttgcaaacgcctggtctccatgaacatgcctctgaacagcgacgggacagtcatgttcaatgccaccctgtttgccctggtcaggacggccctgaggatcaaaacagaagggaacctagaacaagccaatgaggagctgcgggcgatcatcaagaagatctggaagcggaccagcatgaagctgctggaccaggtggtgccccctgcaggtgatgatgaggtcaccgttggcaagttctacgccacgttcctgatccaggagtacttccggaagttcaagaagcgcaaagagcagggccttgtgggcaagccctcccagaggaacgcgctgtctctgcaggctggcttgcgcacactgcatgacatcgggcctgagatccgacgggccatctctggagatctcaccgctgaggaggagctggacaaggccatgaaggaggctgtgtccgctgcttctgaagatgacatcttcaggagggccggtggcctgttcggcaaccacgtcagctactaccaaagcgacggccggagcgccttcccccagaccttcaccactcagcgcccgctgcacatcaacaaggcgggcagcagccagggcgacactgagtcgccatcccacgagaagctggtggactccaccttcaccccgagcagctactcgtccaccggctccaacgccaacatcaacaacgccaacaacaccgccctgggtcgcctccctcgccccgccggctaccccagcacggtcagcactgtggagggccacgggccccccttgtcccctgccatccgggtgcaggaggtggcgtggaagctcagctccaacaggtgccactcccgggagagccaggcagccatggcgggtcaggaggagacgtctcaggatgagacctatgaagtgaagatgaaccatgacacggaggcctgcagtgagcccagcctgctctccacagagatgctctcctaccaggatgacgaaaatcggcaactgacgctcccagaggaggacaagagggacatccggcaatctccgaagaggggtttcctccgctctgcctcactaggtcgaagggcctccttccacctggaatgtctgaagcgacagaaggaccgagggggagacatctctcagaagacagtcctgcccttgcatctggttcatcatcaggcattggcagtggcaggcctgagccccctcctccagagaagccattcccctgcctcattccctaggccttttgccaccccaccagccacacctggcagccgaggctggcccccacagcccgtccccaccctgcggcttgagggggtcgagtccagtgagaaactcaacagcagcttcccatccatccactgcggctcctgggctgagaccacccccggtggcgggggcagcagcgccgcccggagagtccggcccgtctccctcatggtgcccagccaggctggggccccagggaggcagttccacggcagtgccagcagcctggtggaagcggtcttgatttcagaaggactggggcagtttgctcaagatcccaagttcatcgaggtcaccacccaggagctggccgacgcctgcgacatgaccatagaggagatggagagcgcggccgacaacatcctcagcgggggcgccccacagagccccaatggcgccctcttaccctttgtgaactgcagggacgcggggcaggaccgagccgggggcgaagaggacgcgggctgtgtgcgcgcgcggggtcgaccgagtgaggaggagctccaggacagcagggtctacgtcagcagcctgtagtgggcgctgccagatgcgggcttttttttatttgtttcaatgttcctaatgggttcgtttcagaagtgcctcactgttctcgtgacctggagttaaccggaacagcgtcttcattcatttctgttgggaccagacgcggagcctgggtgcgcgagccgccctccgggaggaaggcgcccggctgcgtctgcagaggcggggagaggaggcggcgagggtcccggggcgcgaggaaggcgcctgccctctcccagctcgcaggccccgggcccggccgcgcctccgcggggagagcaccccggcttcccgcgcgccctcaccaaaaggaccctacagcaaacgggtgtctttcgactctgcttgtagaaaccatttgcacatattctgtacgagcctcgctgtctccctagagccagggccctgcggatttggagaagggagcggggcaggacttccaggaggaccccaacccggcccggagagggaggaggaggcctccaggggcgcggagctctggggatgggcgtcgggccggcagtggtgcggctcactccgtccctgcccacctgcgacgggatcccccgaccggcacgggccacgccgagctcccggccagccgccggcccgcaggcagcgcgagggaggagctgcgccgccggctccgcccaaccaggtggtgctgagcttccgctgagcgctcttttgttttgtggtttgacacttttcttgacagcatgttgcagtttcttttcggttttggttttttttaaatgttttattttgctttcccagcgggaggggaggaagaagagtgtttacaaagtcctgtagccccctcacctttctgttttcacttttgccaatgtacatcgggtttggttttcttgtattatttaaacggttgtggtttcctttttccacggaggttcaatagaagccgctgcaggagagttttaccaaccattgtgtatgcccaataatttgttatcatttccttaggtagtaacctatttttgttctggtttggttcggttatctaatggaaaggtaactggcaatgcacttgatgtggtcttgcacatgtgggtgatagagttgggttcctttttatgctgggtgtacaggtgggtttgggagagaggagcatgcgcgagagagtctccgagtgtgtgcgacgcgtgtgtgtgtggtgggttgtctgtgtgcatatgtcctgcccgtgtatatgcacccacaccatgtgcccgtgcacaccagtgactacgcagtcccccctttctggtttagctgtgggaagatctgaatctggggccgtttgaaagcaaaaacaaaccactgtctctgcttctgaaacgggaatcagtaactctttgcattttctgtcccacaagatatgcaaaaacaatgcaataatattcatttaaaaatacaattgtgagttgtgttggcattaaaactgtattttaaaaaaagacagaaatttaagggaaaaacacaagaaggcattttgcttcaatatattccgtgtaatgttttattgcattgataatgtttctgttgaagaaaccgttatacttgaattcaggtcagtttcagtatttttcaaatatttttttaaaactgaattgcaattgtgccaagcgaatataatgaattgaattaagttggttttcggattcacttcttgtatattttgctgcatgtaaagtaaatcattttgtatttggagtgtgacaagctttacctttgaactcaagtgcttttctatatgtggttgggggaaagggaacaagttttctttagtttgcacaatgagcaaaggtatcaccagtgtagtcattattctgctctccacaaacaggtttggacattactgttttgcatatcttgtgtttgcttacatttccctcaatttttccaaaatcgtttgctgggtatgtttgtaccgcctcttgctgtgagagaccaggacctattttattccagtcttcactctgtccactctgctctggtcatctgatttggtacttctccaagaacagcccttcactgtgaggtgcagggaggcgttctgatgagccctcagtcactgggccgtcatccgcatcccccatggaagaggtagctggctttcccttcccttccaccacacggaattttctctttggcttccttaggaaagtgtacactaaccgggaggataaaattaaagtcaggctgcttggagggaggggcatcctcacttccggattcttgttgctctacccaacaaggacagcaggggctcgagaaaggaactggtgaaaccctgatccatctgaaagtcaactctgcgtgctcctttctccatcccttcctcactctggagcagcctttccttcaggcttgccctaatgtttgggctgccggggagggggccaggacaagggaagaggcatccggagctcacagtgggggtgggaacagatttttgtgggggcatctctaatgctcacttatatctccctagaacatcactcttttggtgctgtgtccttcaaatgtatgtcaacagtggtggctgaaaagggactgctttggggaaaacaggacccaaccattcacccagaattgacccattaaatctcttccagtcctagtgttccctgagcccctcttggcacatatataagtaagctagaaattacaataagggacagtccattcctctatgacagcttgctggactgattcatgacaaagtggagaaatgtactcaatactccccggttaacacagtctagaaacagagtttctttatggatatccacacccaagtcatccaaactttcttgattccttttcactgccatcaaggtcctctagaaattgagtttaggtatcatcctttgaaaagttcccaagatttctaccaggaggtacacacaggcgttccctgtctagggcaggaggactatcctagcttgaccttctgatccactagaataagactggcgtatgatgcctgtcatcagaacagactggcacaagtagtgacatcaatgaaccacagcacaatcttccaagtgatgtctactctccacctaaaatggaattttccccatgaccttgtaaaacataattgtcacatcttccatacccctcctgacagcccccaagtgtcaggagaaaacagtcaggggctaagggcccaagggacttgaagaaacaacagtttaaggtctgcagtttggtcaacttaattcttgtcctccgaccagccctgcctctttcatttccagaccttggagaatttttcccagctttgattcagaaggtactagttataacccctttccttcttcttaatccaataggcctcactctcactgggaaatccactcaaaggaacaaggcaatgtctctcattctatttcccagttccaaattccaggtgcttgtctggagtgaagctacccgttactttctcccagcttttctccacccagcatgtctcctgcccatgcagctgaagacagtggggcaacctcaggagaagcagacctttccatgcccaagttcatctcctgagcaacagtgacacctagaaaatgaggactttggaagtcacccaaaagatggtggctactttatggagtcctgaagatacacagccaccactcctaaaggcaaagaaagaaaacacgaatgtaggtcagggatagagtggaaccctggtcatcggggtttttagcctcatcgtgggaaaggtggtaaaggaggatgatggcatctccatccctagaggccaagaattgaaatatcattgtcaaggattagaaacaattcagcaaagaggccacaaaaagggcctgctgactcccagaagacctctttaaaccccaggggaggcaaatacttgctgatggagtctgggccgtttccatattttaaagaagacctgcctctggggcaaatgtcagcacagagaggactgggaggagaatggaggcaagaaaagggcatattttgactccctctgtgcctcttcccagttcatggaaggatgtgttcagcttacccacccacagtgaccagtgtggtggagccgctgacatctcaaggatctatttgggaaggtgagaagagtactcattccatctgggggtgttgttccagccacatcagcctacctggtgggatgtgggggtgtctgccaccctgtcccccctctgctgatgtccctcccctcaggctgtccaggtgccacctgacacaggctgctgtgcaaagacaggcggggaagcccaaacctcactcccagggaggccctcagccgccagagtccaggttctccagaggctacgatttgaggaggttgagggggaagacaggagggaaagaaaagtcctacaactgtcaggaatggggcacctttccctgtccctaagcaaagctccctcttcccactgccctccccagccccagctccctgtcctccccaacacctagtgagaaagacggtgcgtggaagggagtcccatgggcagatgcttacacgacctctttgtgaagcctcttctgggtttaacttcattcatcaatttattcttatgtcaaagcaatgaaacttttctttctggagccagataccaatacaacaggtgaacgggtttctgccacatctctacattgacgggggatgcttgaacaacccccctcactacacagacacacaccgttaaggcacaagggctggggttgagctctagatgagggactttcctgctcctgcaagggtgagcactgtatacacagacaaggagggtgcagtagagtgactcccttggatggaagtagtaccatcagaacctactattattatgacataaattctatttacatacattgagagaatactacaatcaacactttttcctgggatgactttaagaggtttgagccacagcacctgaagtggcaaagatccatggtctttgtagggtattagagaactcttccagtcacctctgaaagcactctagatcttgcagctgagtggatgaagtgtaacaaatctgttgcacgctgagaggagtcagaattagcatttttcatgaaagttccccacgtctctactaagaatgaggaagaaaagactaagactaggtaattacacagaggcttgaaatgttacatcaccagagccaagtcctctcccttcagatcagttactggctgctacacagggacacccccaccttttcagggcatcccatgcactccacttctcaggatctaaggaatttgactttgtagggatcccagaaagggcactgtgccacttcccctggtgtgaatcagacatacattgtacattcatttctaaaattcactcatgcacctcaaaccaaggtcattatccaaaaaaaaaaaaaaaaagctctgggtggaagagtttgtaagttttaagagagggtcatttctatgtgaggaaatgcagaaatggacagaatgattcttattcactgtttgggtctggagaattcccattgtggaaatcttagagatctcaagtttattaccaagggaataaggaaaaaaaggtgagcaggcaccaggccaagcagtggctcccttgccaaggaacctgaggctgcaggtttcagggacccccttgaagaaacctctcctggccattggccaggagaaaagagaagtctctcctgtagagtcacaagagaagcaaaagagggtgggtcactgggtcctggacatagcccccaaccccaagacttcccaatatggagaaactacaccaatgtttaaaaggggaaaaggaaagaacttgtacatcaagggaagatgatttgtaaacacacagtcctgtgcagaaagatccccttcaggaggtgtctccagcatcccaaagctgtgcgcaccttctcttttcctgcctcaggccacctatgcatccagctgcagcccatacccacacctgaaatccatctcttgaatcccagccaggttatataccaccccattgccatgtcctgtcctggccagaatgcatgctgttcccccaagcctcgtgggagtgaggccatgggaaacagagatgagcatgtctggacaagtctgtgatggtagtggatgagaataacccatggcaaaacacgcacattcattaagaaatagggcgacagattccccgttggtgaagcactgaaaggtctattactctcataatattgctgttttattttaatccaccagagctaccatgcaaaactttcctcctgtgaaacgctccagataaagctcctctaatctccccttccctcatgtcctccagctcaaacccaccttcatcccccaaaccaatctgtatcatgcctgttatcagagaggcacagaaagatgggcagtgcctccgttgtcaccattccccacacccctacacacccccacaccctcccctccaggctccacgacttcacagtcttactgttgtaaatatcattgtacagtttgtaatcctcaaataatcccattgtcagaggcctcgcctgatgggccttctcaccctcgagaaaggccagggaatctagaaggggcaacccttcaaggagagcttcagggtcatctctgtgtgagacactattgtatattcctgtaagattgcatttttatctaaggaatgatgttatttaaaaaacaaacaaaaaacacaaaaaataagaattgcaaataaatttcttaacaatgtct

SEQ ID NO: 23 - protein, 2155 aa, Homo sapiens
  ref <308>: DATABASE ACCESSION NUMBER: NCBI / NP_001123308.1
  ref <309>: DATABASE ENTRY DATE: 2014-05-14
  ref <313>: RELEVANT RESIDUES IN SEQ ID NO: (1)..(2155)
MVNENTRMYIPEENHQGSNYGSPRPAHANMNANAAAGLAPEHIPTPGAALSWQAAIDAARQAKLMGSAGNATISTVSSTQRKRQQYGKPKKQGSTTATRPPRALLCLTLKNPIRRACISIVEWKPFEIIILLTIFANCVALAIYIPFPEDDSNATNSNLERVEYLFLIIFTVEAFLKVIAYGLLFHPNAYLRNGWNLLDFIIVVVGLFSAILEQATKADGANALGGKGAGFDVKALRAFRVLRPLRLVSGVPSLQVVLNSIIKAMVPLLHIALLVLFVIIIYAIIGLELFMGKMHKTCYNQEGIADVPAEDDPSPCALETGHGRQCQNGTVCKPGWDGPKHGITNFDNFAFAMLTVFQCITMEGWTDVLYWVNDAVGRDWPWIYFVTLIIIGSFFVLNLVLGVLSGEFSKEREKAKARGDFQKLREKQQLEEDLKGYLDWITQAEDIDPENEDEGMDEEKPRNMSMPTSETESVNTENVAGGDIEGENCGARLAHRISKSKFSRYWRRWNRFCRRKCRAAVKSNVFYWLVIFLVFLNTLTIASEHYNQPNWLTEVQDTANKALLALFTAEMLLKMYSLGLQAYFVSLFNRFDCFVVCGGILETILVETKIMSPLGISVLRCVRLLRIFKITRYWNSLSNLVASLLNSVRSIASLLLLLFLFIIIFSLLGMQLFGGKFNFDEMQTRRSTFDNFPQSLLTVFQILTGEDWNSVMYDGIMAYGGPSFPGMLVCIYFIILFICGNYILLNVFLAIAVDNLADAESLTSAQKEEEEEKERKKLARTASPEKKQELVEKPAVGESKEEKIELKSITADGESPPATKINMDDLQPNENEDKSPYPNPETTGEEDEEEPEMPVGPRPRPLSELHLKEKAVPMPEASAFFIFSSNNRFRLQCHRIVNDTIFTNLILFFILLSSISLAAEDPVQHTSFRNHILGNADYVFTSIFTLEIILKMTAYGAFLHKGSFCRNYFNILDLLVVSVSLISFGIQSSAINVVKILRVLRVLRPLRAINRAKGLKHVVQCVFVAIRTIGNIVIVTTLLQFMFACIGVQLFKGKLYTCSDSSKQTEAECKGNYITYKDGEVDHPIIQPRSWENSKFDFDNVLAAMMALFTVSTFEGWPELLYRSIDSHTEDKGPIYNYRVEISIFFIIYIIIIAFFMMNIFVGFVIVTFQEQGEQEYKNCELDKNQRQCVEYALKARPLRRYIPKNQHQYKVWYVVNSTYFEYLMFVLILLNTICLAMQHYGQSCLFKIAMNILNMLFTGLFTVEMILKLIAFKPKGYFSDPWNVFDFLIVIGSIIDVILSETNHYFCDAWNTFDALIVVGSIVDIAITEVNNAEENSRISITFFRLFRVMRLVKLLSRGEGIRTLLWTFIKSFQALPYVALLIVMLFFIYAVIGMQVFGKIALNDTTEINRNNNFQTFPQAVLLLFRCATGEAWQDIMLACMPGKKCAPESEPSNSTEGETPCGSSFAVFYFISFYMLCAFLIINLFVAVIMDNFDYLTRDWSILGPHHLDEFKRIWAEYDPEAKGRIKHLDVVTLLRRIQPPLGFGKLCPHRVACKRLVSMNMPLNSDGTVMFNATLFALVRTALRIKTEGNLEQANEELRAIIKKIWKRTSMKLLDQVVPPAGDDEVTVGKFYATFLIQEYFRKFKKRKEQGLVGKPSQRNALSLQAGLRTLHDIGPEIRRAISGDLTAEEELDKAMKEAVSAASEDDIFRRAGGLFGNHVSYYQSDGRSAFPQTFTTQRPLHINKAGSSQGDTESPSHEKLVDSTFTPSSYSSTGSNANINNANNTALGRLPRPAGYPSTVSTVEGHGPPLSPAIRVQEVAWKLSSNRCHSRESQAAMAGQEETSQDETYEVKMNHDTEACSEPSLLSTEMLSYQDDENRQLTLPEEDKRDIRQSPKRGFLRSASLGRRASFHLECLKRQKDRGGDISQKTVLPLHLVHHQALAVAGLSPLLQRSHSPASFPRPFATPPATPGSRGWPPQPVPTLRLEGVESSEKLNSSFPSIHCGSWAETTPGGGGSSAARRVRPVSLMVPSQAGAPGRQFHGSASSLVEAVLISEGLGQFAQDPKFIEVTTQELADACDMTIEEMESAADNILSGGAPQSPNGALLPFVNCRDAGQDRAGGEEDAGCVRARGRPSEEELQDSRVYVSSL

SEQ ID NO: 24 - DNA, 13504 bp, Homo sapiens
ttattttttcaaatggtgtagccgccggaggtgcggtgctcagttcttggaaggggcccggatgtactgaggatgcgttacagtttcactcgaggaggcagtagtggaaaggagcagtttttggggtttgatgccataatgggaatcaggtaatcgtcggcggggaagaagaaacgctgcagaccacggcttcctcgaatcttgcgcgaaagccgccggcctcggaggagggattaatccagacccgccggggggtgttttcacatttcttcctcttcgtggctgctcctcctattaaaaccatttttggtccatggtcaatgagaatacgaggatgtacattccagaggaaaaccaccaaggttccaactatgggagcccacgccccgcccatgccaacatgaatgccaatgcggcagcggggctggcccctgagcacatccccaccccgggggctgccctgtcgtggcaggcggccatcgacgcagcccggcaggctaagctgatgggcagcgctggcaatgcgaccatctccacagtcagctccacgcagcggaagcggcagcaatatgggaaacccaagaagcagggcagcaccacggccacacgcccgccccgagccctgctctgcctgaccctgaagaaccccatccggagggcctgcatcagcattgtcgaatggaaaccatttgaaataattattttactgactatttttgccaattgtgtggccttagcgatctatattccctttccagaagatgattccaacgccaccaattccaacctggaacgagtggaatatctctttctcataatttttacggtggaagcgtttttaaaagtaatcgcctatggactcctctttcaccccaatgcctacctccgcaacggctggaacctactagattttataattgtggttgtggggctttttagtgcaattttagaacaagcaaccaaagcagatggggcaaacgctctcggagggaaaggggccggatttgatgtgaaggcgctgagggccttccgcgtgctgcgccccctgcggctggtgtccggagtcccaagtctccaggtggtcctgaattccatcatcaaggccatggtccccctgctgcacatcgccctgcttgtgctgtttgtcatcatcatctacgccatcatcggcttggagctcttcatggggaagatgcacaagacctgctacaaccaggagggcatagcagatgttccagcagaagatgacccttccccttgtgcgctggaaacgggccacgggcggcagtgccagaacggcacggtgtgcaagcccggctgggatggtcccaagcacggcatcaccaactttgacaactttgccttcgccatgctcacggtgttccagtgcatcaccatggagggctggacggacgtgctgtactgggtcaatgatgccgtaggaagggactggccctggatctattttgttacactaatcatcatagggtcattttttgtacttaacttggttctcggtgtgcttagcggagagttttccaaagagagggagaaggccaaggcccggggagatttccagaagctgcgggagaagcagcagctagaagaggatctcaaaggctacctggattggatcactcaggccgaagacatcgatcctgagaatgaggacgaaggcatggatgaggagaagccccgaaacatgagcatgcccaccagtgagaccgagtccgtcaacaccgaaaacgtggctggaggtgacatcgagggagaaaactgcggggccaggctggcccaccggatctccaagtcaaagttcagccgctactggcgccggtggaatcggttctgcagaaggaagtgccgcgccgcagtcaagtctaatgtcttctactggctggtgattttcctggtgttcctcaacacgctcaccattgcctctgagcactacaaccagcccaactggctcacagaagtccaagacacggcaaacaaggccctgctggccctgttcacggcagagatgctcctgaagatgtacagcctgggcctgcaggcctacttcgtgtccctcttcaaccgctttgactgcttcgtcgtgtgtggcggcatcctggagaccatcctggtggagaccaagatcatgtccccactgggcatctccgtgctcagatgcgtccggctgctgaggattttcaagatcacgaggtactggaactccttgagcaacctggtggcatccttgctgaactctgtgcgctccatcgcctccctgctccttctcctcttcctcttcatcatcatcttctccctcctggggatgcagctctttggaggaaagttcaactttgatgagatgcagacccggaggagcacattcgataacttcccccagtccctcctcactgtgtttcagatcctgaccggggaggactggaattcggtgatgtatgatgggatcatggcttatggcggcccctcttttccagggatgttagtctgtatttacttcatcatcctcttcatctgtggaaactatatcctactgaatgtgttcttggccattgctgtggacaacctggctgatgctgagagcctcacatctgcccaaaaggaggaggaagaggagaaggagagaaagaagctggccaggactgccagcccagagaagaaacaagagttggtggagaagccggcagtgggggaatccaaggaggagaagattgagctgaaatccatcacggctgacggagagtctccacccgccaccaagatcaacatggatgacctccagcccaatgaaaatgaggataagagcccctaccccaacccagaaactacaggagaagaggatgaggaggagccagagatgcctgtcggccctcgcccacgaccactctctgagcttcaccttaaggaaaaggcagtgcccatgccagaagccagcgcgtttttcatcttcagctctaacaacaggtttcgcctccagtgccaccgcattgtcaatgacacgatcttcaccaacctgatcctcttcttcattctgctcagcagcatttccctggctgctgaggacccggtccagcacacctccttcaggaaccatattctgttttattttgatattgtttttaccaccattttcaccattgaaattgctctgaagatgactgcttatggggctttcttgcacaagggttctttctgccggaactacttcaacatcctggacctgctggtggtcagcgtgtccctcatctcctttggcatccagtccagtgcaatcaatgtcgtgaagatcttgcgagtcctgcgagtactcaggcccctgagggccatcaacagggccaaggggctaaagcatgtggttcagtgtgtgtttgtcgccatccggaccatcgggaacatcgtgattgtcaccaccctgctgcagttcatgtttgcctgcatcggggtccagctcttcaagggaaagctgtacacctgttcagacagttccaagcagacagaggcggaatgcaagggcaactacatcacgtacaaagacggggaggttgaccaccccatcatccaaccccgcagctgggagaacagcaagtttgactttgacaatgttctggcagccatgatggccctcttcaccgtctccaccttcgaagggtggccagagctgctgtaccgctccatcgactcccacacggaagacaagggccccatctacaactaccgtgtggagatctccatcttcttcatcatctacatcatcatcatcgccttcttcatgatgaacatcttcgtgggcttcgtcatcgtcacctttcaggagcagggggagcaggagtacaagaactgtgagctggacaagaaccagcgacagtgcgtggaatacgccctcaaggcccggcccctgcggaggtacatccccaagaaccagcaccagtacaaagtgtggtacgtggtcaactccacctacttcgagtacctgatgttcgtcctcatcctgctcaacaccatctgcctggccatgcagcactacggccagagctgcctgttcaaaatcgccatgaacatcctcaacatgctcttcactggcctcttcaccgtggagatgatcctgaagctcattgccttcaaacccaagcactatttctgtgatgcatggaatacatttgacgccttgattgttgtgggtagcattgttgatatagcaatcaccgaggtaaacaacgcagaggaaaactcccgcatctccatcaccttcttccgcctgttccgggtcatgcgtctggtgaagctgctgagccgtggggagggcatccggacgctgctgtggaccttcatcaagtccttccaggccctgccctatgtggccctcctgatcgtgatgctgttcttcatctacgcggtgatcgggatgcaggtgtttgggaaaattgccctgaatgataccacagagatcaaccggaacaacaactttcagaccttcccccaggccgtgctgctcctcttcaggtgtgccaccggggaggcctggcaggacatcatgctggcctgcatgccaggcaagaagtgtgccccagagtccgagcccagcaacagcacggagggtgaaacaccctgtggtagcagctttgctgtcttctacttcatcagcttctacatgctctgtgccttcctgatcatcaacctctttgtagctgtcatcatggacaactttgactacctgacaagggactggtccatccttggtccccaccacctggatgagtttaaaagaatctgggcagagtatgaccctgaagccaagggtcgtatcaaacacctggatgtggtgaccctcctccggcggattcagccgccactaggttttgggaagctgtgccctcaccgcgtggcttgcaaacgcctggtctccatgaacatgcctctgaacagcgacgggacagtcatgttcaatgccaccctgtttgccctggtcaggacggccctgaggatcaaaacagaagagggacccagcccatcagaggcccaccaaggggctgaggatcctttccgccctgcagggaacctagaacaagccaatgaggagctgcgggcgatcatcaagaagatctggaagcggaccagcatgaagctgctggaccaggtggtgccccctgcaggtgatgatgaggtcaccgttggcaagttctacgccacgttcctgatccaggagtacttccggaagttcaagaagcgcaaagagcagggccttgtgggcaagccctcccagaggaacgcgctgtctctgcaggctggcttgcgcacactgcatgacatcgggcctgagatccgacgggccatctctggagatctcaccgctgaggaggagctggacaaggccatgaaggaggctgtgtccgctgcttctgaagatgacatcttcaggagggccggtggcctgttcggcaaccacgtcagctactaccaaagcgacggccggagcgccttcccccagaccttcaccactcagcgcccgctgcacatcaacaaggcgggcagcagccagggcgacactgagtcgccatcccacgagaagctggtggactccaccttcaccccgagcagctactcgtccaccggctccaacgccaacatcaacaacgccaacaacaccgccctgggtcgcctccctcgccccgccggctaccccagcacggtcagcactgtggagggccacgggccccccttgtcccctgccatccgggtgcaggaggtggcgtggaagctcagctccaacaggtgccactcccgggagagccaggcagccatggcgggtcaggaggagacgtctcaggatgagacctatgaagtgaagatgaaccatgacacggaggcctgcagtgagcccagcctgctctccacagagatgctctcctaccaggatgacgaaaatcggcaactgacgctcccagaggaggacaagagggacatccggcaatctccgaagaggggtttcctccgctctgcctcactaggtcgaagggcctccttccacctggaatgtctgaagcgacagaaggaccgagggggagacatctctcagaagacagtcctgcccttgcatctggttcatcatcaggcattggcagtggcaggcctgagccccctcctccagagaagccattcccctgcctcattccctaggccttttgccaccccaccagccacacctggcagccgaggctggcccccacagcccgtccccaccctgcggcttgagggggtcgagtccagtgagaaactcaacagcagcttcccatccatccactgcggctcctgggctgagaccacccccggtggcgggggcagcagcgccgcccggagagtccggcccgtctccctcatggtgcccagccaggctggggccccagggaggcagttccacggcagtgccagcagcctggtggaagcggtcttgatttcagaaggactggggcagtttgctcaagatcccaagttcatcgaggtcaccacccaggagctggccgacgcctgcgacatgaccatagaggagatggagagcgcggccgacaacatcctcagcgggggcgccccacagagccccaatggcgccctcttaccctttgtgaactgcagggacgcggggcaggaccgagccgggggcgaagaggacgcgggctgtgtgcgcgcgcggggtcgaccgagtgaggaggagctccaggacagcagggtctacgtcagcagcctgtagtgggcgctgccagatgcgggcttttttttatttgtttcaatgttcctaatgggttcgtttcagaagtgcctcactgttctcgtgacctggagttaaccggaacagcgtcttcattcatttctgttgggaccagacgcggagcctgggtgcgcgagccgccctccgggaggaaggcgcccggctgcgtctgcagaggcggggagaggaggcggcgagggtcccggggcgcgaggaaggcgcctgccctctcccagctcgcaggccccgggcccggccgcgcctccgcggggagagcaccccggcttcccgcgcgccctcaccaaaaggaccctacagcaaacgggtgtctttcgactctgcttgtagaaaccatttgcacatattctgtacgagcctcgctgtctccctagagccagggccctgcggatttggagaagggagcggggcaggacttccaggaggaccccaacccggcccggagagggaggaggaggcctccaggggcgcggagctctggggatgggcgtcgggccggcagtggtgcggctcactccgtccctgcccacctgcgacgggatcccccgaccggcacgggccacgccgagctcccggccagccgccggcccgcaggcagcgcgagggaggagctgcgccgccggctccgcccaaccaggtggtgctgagcttccgctgagcgctcttttgttttgtggtttgacacttttcttgacagcatgttgcagtttcttttcggttttggttttttttaaatgttttattttgctttcccagcgggaggggaggaagaagagtgtttacaaagtcctgtagccccctcacctttctgttttcacttttgccaatgtacatcgggtttggttttcttgtattatttaaacggttgtggtttcctttttccacggaggttcaatagaagccgctgcaggagagttttaccaaccattgtgtatgcccaataatttgttatcatttccttaggtagtaacctatttttgttctggtttggttcggttatctaatggaaaggtaactggcaatgcacttgatgtggtcttgcacatgtgggtgatagagttgggttcctttttatgctgggtgtacaggtgggtttgggagagaggagcatgcgcgagagagtctccgagtgtgtgcgacgcgtgtgtgtgtggtgggttgtctgtgtgcatatgtcctgcccgtgtatatgcacccacaccatgtgcccgtgcacaccagtgactacgcagtcccccctttctggtttagctgtgggaagatctgaatctggggccgtttgaaagcaaaaacaaaccactgtctctgcttctgaaacgggaatcagtaactctttgcattttctgtcccacaagatatgcaaaaacaatgcaataatattcatttaaaaatacaattgtgagttgtgttggcattaaaactgtattttaaaaaaagacagaaatttaagggaaaaacacaagaaggcattttgcttcaatatattccgtgtaatgttttattgcattgataatgtttctgttgaagaaaccgttatacttgaattcaggtcagtttcagtatttttcaaatatttttttaaaactgaattgcaattgtgccaagcgaatataatgaattgaattaagttggttttcggattcacttcttgtatattttgctgcatgtaaagtaaatcattttgtatttggagtgtgacaagctttacctttgaactcaagtgcttttctatatgtggttgggggaaagggaacaagttttctttagtttgcacaatgagcaaaggtatcaccagtgtagtcattattctgctctccacaaacaggtttggacattactgttttgcatatcttgtgtttgcttacatttccctcaatttttccaaaatcgtttgctgggtatgtttgtaccgcctcttgctgtgagagaccaggacctattttattccagtcttcactctgtccactctgctctggtcatctgatttggtacttctccaagaacagcccttcactgtgaggtgcagggaggcgttctgatgagccctcagtcactgggccgtcatccgcatcccccatggaagaggtagctggctttcccttcccttccaccacacggaattttctctttggcttccttaggaaagtgtacactaaccgggaggataaaattaaagtcaggctgcttggagggaggggcatcctcacttccggattcttgttgctctacccaacaaggacagcaggggctcgagaaaggaactggtgaaaccctgatccatctgaaagtcaactctgcgtgctcctttctccatcccttcctcactctggagcagcctttccttcaggcttgccctaatgtttgggctgccggggagggggccaggacaagggaagaggcatccggagctcacagtgggggtgggaacagatttttgtgggggcatctctaatgctcacttatatctccctagaacatcactcttttggtgctgtgtccttcaaatgtatgtcaacagtggtggctgaaaagggactgctttggggaaaacaggacccaaccattcacccagaattgacccattaaatctcttccagtcctagtgttccctgagcccctcttggcacatatataagtaagctagaaattacaataagggacagtccattcctctatgacagcttgctggactgattcatgacaaagtggagaaatgtactcaatactccccggttaacacagtctagaaacagagtttctttatggatatccacacccaagtcatccaaactttcttgattccttttcactgccatcaaggtcctctagaaattgagtttaggtatcatcctttgaaaagttcccaagatttctaccaggaggtacacacaggcgttccctgtctagggcaggaggactatcctagcttgaccttctgatccactagaataagactggcgtatgatgcctgtcatcagaacagactggcacaagtagtgacatcaatgaaccacagcacaatcttccaagtgatgtctactctccacctaaaatggaattttccccatgaccttgtaaaacataattgtcacatcttccatacccctcctgacagcccccaagtgtcaggagaaaacagtcaggggctaagggcccaagggacttgaagaaacaacagtttaaggtctgcagtttggtcaacttaattcttgtcctccgaccagccctgcctctttcatttccagaccttggagaatttttcccagctttgattcagaaggtactagttataacccctttccttcttcttaatccaataggcctcactctcactgggaaatccactcaaaggaacaaggcaatgtctctcattctatttcccagttccaaattccaggtgcttgtctggagtgaagctacccgttactttctcccagcttttctccacccagcatgtctcctgcccatgcagctgaagacagtggggcaacctcaggagaagcagacctttccatgcccaagttcatctcctgagcaacagtgacacctagaaaatgaggactttggaagtcacccaaaagatggtggctactttatggagtcctgaagatacacagccaccactcctaaaggcaaagaaagaaaacacgaatgtaggtcagggatagagtggaaccctggtcatcggggtttttagcctcatcgtgggaaaggtggtaaaggaggatgatggcatctccatccctagaggccaagaattgaaatatcattgtcaaggattagaaacaattcagcaaagaggccacaaaaagggcctgctgactcccagaagacctctttaaaccccaggggaggcaaatacttgctgatggagtctgggccgtttccatattttaaagaagacctgcctctggggcaaatgtcagcacagagaggactgggaggagaatggaggcaagaaaagggcatattttgactccctctgtgcctcttcccagttcatggaaggatgtgttcagcttacccacccacagtgaccagtgtggtggagccgctgacatctcaaggatctatttgggaaggtgagaagagtactcattccatctgggggtgttgttccagccacatcagcctacctggtgggatgtgggggtgtctgccaccctgtcccccctctgctgatgtccctcccctcaggctgtccaggtgccacctgacacaggctgctgtgcaaagacaggcggggaagcccaaacctcactcccagggaggccctcagccgccagagtccaggttctccagaggctacgatttgaggaggttgagggggaagacaggagggaaagaaaagtcctacaactgtcaggaatggggcacctttccctgtccctaagcaaagctccctcttcccactgccctccccagccccagctccctgtcctccccaacacctagtgagaaagacggtgcgtggaagggagtcccatgggcagatgcttacacgacctctttgtgaagcctcttctgggtttaacttcattcatcaatttattcttatgtcaaagcaatgaaacttttctttctggagccagataccaatacaacaggtgaacgggtttctgccacatctctacattgacgggggatgcttgaacaacccccctcactacacagacacacaccgttaaggcacaagggctggggttgagctctagatgagggactttcctgctcctgcaagggtgagcactgtatacacagacaaggagggtgcagtagagtgactcccttggatggaagtagtaccatcagaacctactattattatgacataaattctatttacatacattgagagaatactacaatcaacactttttcctgggatgactttaagaggtttgagccacagcacctgaagtggcaaagatccatggtctttgtagggtattagagaactcttccagtcacctctgaaagcactctagatcttgcagctgagtggatgaagtgtaacaaatctgttgcacgctgagaggagtcagaattagcatttttcatgaaagttccccacgtctctactaagaatgaggaagaaaagactaagactaggtaattacacagaggcttgaaatgttacatcaccagagccaagtcctctcccttcagatcagttactggctgctacacagggacacccccaccttttcagggcatcccatgcactccacttctcaggatctaaggaatttgactttgtagggatcccagaaagggcactgtgccacttcccctggtgtgaatcagacatacattgtacattcatttctaaaattcactcatgcacctcaaaccaaggtcattatccaaaaaaaaaaaaaaaaagctctgggtggaagagtttgtaagttttaagagagggtcatttctatgtgaggaaatgcagaaatggacagaatgattcttattcactgtttgggtctggagaattcccattgtggaaatcttagagatctcaagtttattaccaagggaataaggaaaaaaaggtgagcaggcaccaggccaagcagtggctcccttgccaaggaacctgaggctgcaggtttcagggacccccttgaagaaacctctcctggccattggccaggagaaaagagaagtctctcctgtagagtcacaagagaagcaaaagagggtgggtcactgggtcctggacatagcccccaaccccaagacttcccaatatggagaaactacaccaatgtttaaaaggggaaaaggaaagaacttgtacatcaagggaagatgatttgtaaacacacagtcctgtgcagaaagatccccttcaggaggtgtctccagcatcccaaagctgtgcgcaccttctcttttcctgcctcaggccacctatgcatccagctgcagcccatacccacacctgaaatccatctcttgaatcccagccaggttatataccaccccattgccatgtcctgtcctggccagaatgcatgctgttcccccaagcctcgtgggagtgaggccatgggaaacagagatgagcatgtctggacaagtctgtgatggtagtggatgagaataacccatggcaaaacacgcacattcattaagaaatagggcgacagattccccgttggtgaagcactgaaaggtctattactctcataatattgctgttttattttaatccaccagagctaccatgcaaaactttcctcctgtgaaacgctccagataaagctcctctaatctccccttccctcatgtcctccagctcaaacccaccttcatcccccaaaccaatctgtatcatgcctgttatcagagaggcacagaaagatgggcagtgcctccgttgtcaccattccccacacccctacacacccccacaccctcccctccaggctccacgacttcacagtcttactgttgtaaatatcattgtacagtttgtaatcctcaaataatcccattgtcagaggcctcgcctgatgggccttctcaccctcgagaaaggccagggaatctagaaggggcaacccttcaaggagagcttcagggtcatctctgtgtgagacactattgtatattcctgtaagattgcatttttatctaaggaatgatgttatttaaaaaacaaacaaaaaacacaaaaaataagaattgcaaataaatttcttaacaatgtct

SEQ ID NO: 25 - protein, 2146 aa, Homo sapiens
  ref <308>: DATABASE ACCESSION NUMBER: NCBI / NP_001123309.1
  ref <309>: DATABASE ENTRY DATE: 2014-05-14
  ref <313>: RELEVANT RESIDUES IN SEQ ID NO: (1)..(2146)
MVNENTRMYIPEENHQGSNYGSPRPAHANMNANAAAGLAPEHIPTPGAALSWQAAIDAARQAKLMGSAGNATISTVSSTQRKRQQYGKPKKQGSTTATRPPRALLCLTLKNPIRRACISIVEWKPFEIIILLTIFANCVALAIYIPFPEDDSNATNSNLERVEYLFLIIFTVEAFLKVIAYGLLFHPNAYLRNGWNLLDFIIVVVGLFSAILEQATKADGANALGGKGAGFDVKALRAFRVLRPLRLVSGVPSLQVVLNSIIKAMVPLLHIALLVLFVIIIYAIIGLELFMGKMHKTCYNQEGIADVPAEDDPSPCALETGHGRQCQNGTVCKPGWDGPKHGITNFDNFAFAMLTVFQCITMEGWTDVLYWVNDAVGRDWPWIYFVTLIIIGSFFVLNLVLGVLSGEFSKEREKAKARGDFQKLREKQQLEEDLKGYLDWITQAEDIDPENEDEGMDEEKPRNMSMPTSETESVNTENVAGGDIEGENCGARLAHRISKSKFSRYWRRWNRFCRRKCRAAVKSNVFYWLVIFLVFLNTLTIASEHYNQPNWLTEVQDTANKALLALFTAEMLLKMYSLGLQAYFVSLFNRFDCFVVCGGILETILVETKIMSPLGISVLRCVRLLRIFKITRYWNSLSNLVASLLNSVRSIASLLLLLFLFIIIFSLLGMQLFGGKFNFDEMQTRRSTFDNFPQSLLTVFQILTGEDWNSVMYDGIMAYGGPSFPGMLVCIYFIILFICGNYILLNVFLAIAVDNLADAESLTSAQKEEEEEKERKKLARTASPEKKQELVEKPAVGESKEEKIELKSITADGESPPATKINMDDLQPNENEDKSPYPNPETTGEEDEEEPEMPVGPRPRPLSELHLKEKAVPMPEASAFFIFSSNNRFRLQCHRIVNDTIFTNLILFFILLSSISLAAEDPVQHTSFRNHILFYFDIVFTTIFTIEIALKMTAYGAFLHKGSFCRNYFNILDLLVVSVSLISFGIQSSAINVVKILRVLRVLRPLRAINRAKGLKHVVQCVFVAIRTIGNIVIVTTLLQFMFACIGVQLFKGKLYTCSDSSKQTEAECKGNYITYKDGEVDHPIIQPRSWENSKFDFDNVLAAMMALFTVSTFEGWPELLYRSIDSHTEDKGPIYNYRVEISIFFIIYIIIIAFFMMNIFVGFVIVTFQEQGEQEYKNCELDKNQRQCVEYALKARPLRRYIPKNQHQYKVWYVVNSTYFEYLMFVLILLNTICLAMQHYGQSCLFKIAMNILNMLFTGLFTVEMILKLIAFKPKHYFCDAWNTFDALIVVGSIVDIAITEVNNAEENSRISITFFRLFRVMRLVKLLSRGEGIRTLLWTFIKSFQALPYVALLIVMLFFIYAVIGMQVFGKIALNDTTEINRNNNFQTFPQAVLLLFRCATGEAWQDIMLACMPGKKCAPESEPSNSTEGETPCGSSFAVFYFISFYMLCAFLIINLFVAVIMDNFDYLTRDWSILGPHHLDEFKRIWAEYDPEAKGRIKHLDVVTLLRRIQPPLGFGKLCPHRVACKRLVSMNMPLNSDGTVMFNATLFALVRTALRIKTEEGPSPSEAHQGAEDPFRPAGNLEQANEELRAIIKKIWKRTSMKLLDQVVPPAGDDEVTVGKFYATFLIQEYFRKFKKRKEQGLVGKPSQRNALSLQAGLRTLHDIGPEIRRAISGDLTAEEELDKAMKEAVSAASEDDIFRRAGGLFGNHVSYYQSDGRSAFPQTFTTQRPLHINKAGSSQGDTESPSHEKLVDSTFTPSSYSSTGSNANINNANNTALGRLPRPAGYPSTVSTVEGHGPPLSPAIRVQEVAWKLSSNRCHSRESQAAMAGQEETSQDETYEVKMNHDTEACSEPSLLSTEMLSYQDDENRQLTLPEEDKRDIRQSPKRGFLRSASLGRRASFHLECLKRQKDRGGDISQKTVLPLHLVHHQALAVAGLSPLLQRSHSPASFPRPFATPPATPGSRGWPPQPVPTLRLEGVESSEKLNSSFPSIHCGSWAETTPGGGGSSAARRVRPVSLMVPSQAGAPGRQFHGSASSLVEAVLISEGLGQFAQDPKFIEVTTQELADACDMTIEEMESAADNILSGGAPQSPNGALLPFVNCRDAGQDRAGGEEDAGCVRARGRPSEEELQDSRVYVSSL

SEQ ID NO: 26 - DNA, 13504 bp, Homo sapiens
  ref <308>: DATABASE ACCESSION NUMBER: NCBI / NM_001129838.1
  ref <309>: DATABASE ENTRY DATE: 2014-05-14
  ref <313>: RELEVANT RESIDUES IN SEQ ID NO: (1)..(13504)
ttattttttcaaatggtgtagccgccggaggtgcggtgctcagttcttggaaggggcccggatgtactgaggatgcgttacagtttcactcgaggaggcagtagtggaaaggagcagtttttggggtttgatgccataatgggaatcaggtaatcgtcggcggggaagaagaaacgctgcagaccacggcttcctcgaatcttgcgcgaaagccgccggcctcggaggagggattaatccagacccgccggggggtgttttcacatttcttcctcttcgtggctgctcctcctattaaaaccatttttggtccatggtcaatgagaatacgaggatgtacattccagaggaaaaccaccaaggttccaactatgggagcccacgccccgcccatgccaacatgaatgccaatgcggcagcggggctggcccctgagcacatccccaccccgggggctgccctgtcgtggcaggcggccatcgacgcagcccggcaggctaagctgatgggcagcgctggcaatgcgaccatctccacagtcagctccacgcagcggaagcggcagcaatatgggaaacccaagaagcagggcagcaccacggccacacgcccgccccgagccctgctctgcctgaccctgaagaaccccatccggagggcctgcatcagcattgtcgaatggaaaccatttgaaataattattttactgactatttttgccaattgtgtggccttagcgatctatattccctttccagaagatgattccaacgccaccaattccaacctggaacgagtggaatatctctttctcataatttttacggtggaagcgtttttaaaagtaatcgcctatggactcctctttcaccccaatgcctacctccgcaacggctggaacctactagattttataattgtggttgtggggctttttagtgcaattttagaacaagcaaccaaagcagatggggcaaacgctctcggagggaaaggggccggatttgatgtgaaggcgctgagggccttccgcgtgctgcgccccctgcggctggtgtccggagtcccaagtctccaggtggtcctgaattccatcatcaaggccatggtccccctgctgcacatcgccctgcttgtgctgtttgtcatcatcatctacgccatcatcggcttggagctcttcatggggaagatgcacaagacctgctacaaccaggagggcatagcagatgttccagcagaagatgacccttccccttgtgcgctggaaacgggccacgggcggcagtgccagaacggcacggtgtgcaagcccggctgggatggtcccaagcacggcatcaccaactttgacaactttgccttcgccatgctcacggtgttccagtgcatcaccatggagggctggacggacgtgctgtactgggtcaatgatgccgtaggaagggactggccctggatctattttgttacactaatcatcatagggtcattttttgtacttaacttggttctcggtgtgcttagcggagagttttccaaagagagggagaaggccaaggcccggggagatttccagaagctgcgggagaagcagcagctagaagaggatctcaaaggctacctggattggatcactcaggccgaagacatcgatcctgagaatgaggacgaaggcatggatgaggagaagccccgaaacatgagcatgcccaccagtgagaccgagtccgtcaacaccgaaaacgtggctggaggtgacatcgagggagaaaactgcggggccaggctggcccaccggatctccaagtcaaagttcagccgctactggcgccggtggaatcggttctgcagaaggaagtgccgcgccgcagtcaagtctaatgtcttctactggctggtgattttcctggtgttcctcaacacgctcaccattgcctctgagcactacaaccagcccaactggctcacagaagtccaagacacggcaaacaaggccctgctggccctgttcacggcagagatgctcctgaagatgtacagcctgggcctgcaggcctacttcgtgtccctcttcaaccgctttgactgcttcgtcgtgtgtggcggcatcctggagaccatcctggtggagaccaagatcatgtccccactgggcatctccgtgctcagatgcgtccggctgctgaggattttcaagatcacgaggtactggaactccttgagcaacctggtggcatccttgctgaactctgtgcgctccatcgcctccctgctccttctcctcttcctcttcatcatcatcttctccctcctggggatgcagctctttggaggaaagttcaactttgatgagatgcagacccggaggagcacattcgataacttcccccagtccctcctcactgtgtttcagatcctgaccggggaggactggaattcggtgatgtatgatgggatcatggcttatggcggcccctcttttccagggatgttagtctgtatttacttcatcatcctcttcatctgtggaaactatatcctactgaatgtgttcttggccattgctgtggacaacctggctgatgctgagagcctcacatctgcccaaaaggaggaggaagaggagaaggagagaaagaagctggccaggactgccagcccagagaagaaacaagagttggtggagaagccggcagtgggggaatccaaggaggagaagattgagctgaaatccatcacggctgacggagagtctccacccgccaccaagatcaacatggatgacctccagcccaatgaaaatgaggataagagcccctaccccaacccagaaactacaggagaagaggatgaggaggagccagagatgcctgtcggccctcgcccacgaccactctctgagcttcaccttaaggaaaaggcagtgcccatgccagaagccagcgcgtttttcatcttcagctctaacaacaggtttcgcctccagtgccaccgcattgtcaatgacacgatcttcaccaacctgatcctcttcttcattctgctcagcagcatttccctggctgctgaggacccggtccagcacacctccttcaggaaccatatcctaggcaatgcagactatgtcttcactagtatctttacattagaaattatccttaagatgactgcttatggggctttcttgcacaagggttctttctgccggaactacttcaacatcctggacctgctggtggtcagcgtgtccctcatctcctttggcatccagtccagtgcaatcaatgtcgtgaagatcttgcgagtcctgcgagtactcaggcccctgagggccatcaacagggccaaggggctaaagcatgtggttcagtgtgtgtttgtcgccatccggaccatcgggaacatcgtgattgtcaccaccctgctgcagttcatgtttgcctgcatcggggtccagctcttcaagggaaagctgtacacctgttcagacagttccaagcagacagaggcggaatgcaagggcaactacatcacgtacaaagacggggaggttgaccaccccatcatccaaccccgcagctgggagaacagcaagtttgactttgacaatgttctggcagccatgatggccctcttcaccgtctccaccttcgaagggtggccagagctgctgtaccgctccatcgactcccacacggaagacaagggccccatctacaactaccgtgtggagatctccatcttcttcatcatctacatcatcatcatcgccttcttcatgatgaacatcttcgtgggcttcgtcatcgtcacctttcaggagcagggggagcaggagtacaagaactgtgagctggacaagaaccagcgacagtgcgtggaatacgccctcaaggcccggcccctgcggaggtacatccccaagaaccagcaccagtacaaagtgtggtacgtggtcaactccacctacttcgagtacctgatgttcgtcctcatcctgctcaacaccatctgcctggccatgcagcactacggccagagctgcctgttcaaaatcgccatgaacatcctcaacatgctcttcactggcctcttcaccgtggagatgatcctgaagctcattgccttcaaacccaagcactatttctgtgatgcatggaatacatttgacgccttgattgttgtgggtagcattgttgatatagcaatcaccgaggtaaacaacgcagaggaaaactcccgcatctccatcaccttcttccgcctgttccgggtcatgcgtctggtgaagctgctgagccgtggggagggcatccggacgctgctgtggaccttcatcaagtccttccaggccctgccctatgtggccctcctgatcgtgatgctgttcttcatctacgcggtgatcgggatgcaggtgtttgggaaaattgccctgaatgataccacagagatcaaccggaacaacaactttcagaccttcccccaggccgtgctgctcctcttcaggtgtgccaccggggaggcctggcaggacatcatgctggcctgcatgccaggcaagaagtgtgccccagagtccgagcccagcaacagcacggagggtgaaacaccctgtggtagcagctttgctgtcttctacttcatcagcttctacatgctctgtgccttcctgatcatcaacctctttgtagctgtcatcatggacaactttgactacctgacaagggactggtccatccttggtccccaccacctggatgagtttaaaagaatctgggcagagtatgaccctgaagccaagggtcgtatcaaacacctggatgtggtgaccctcctccggcggattcagccgccactaggttttgggaagctgtgccctcaccgcgtggcttgcaaacgcctggtctccatgaacatgcctctgaacagcgacgggacagtcatgttcaatgccaccctgtttgccctggtcaggacggccctgaggatcaaaacagaagagggacccagcccatcagaggcccaccaaggggctgaggatcctttccgccctgcagggaacctagaacaagccaatgaggagctgcgggcgatcatcaagaagatctggaagcggaccagcatgaagctgctggaccaggtggtgccccctgcaggtgatgatgaggtcaccgttggcaagttctacgccacgttcctgatccaggagtacttccggaagttcaagaagcgcaaagagcagggccttgtgggcaagccctcccagaggaacgcgctgtctctgcaggctggcttgcgcacactgcatgacatcgggcctgagatccgacgggccatctctggagatctcaccgctgaggaggagctggacaaggccatgaaggaggctgtgtccgctgcttctgaagatgacatcttcaggagggccggtggcctgttcggcaaccacgtcagctactaccaaagcgacggccggagcgccttcccccagaccttcaccactcagcgcccgctgcacatcaacaaggcgggcagcagccagggcgacactgagtcgccatcccacgagaagctggtggactccaccttcaccccgagcagctactcgtccaccggctccaacgccaacatcaacaacgccaacaacaccgccctgggtcgcctccctcgccccgccggctaccccagcacggtcagcactgtggagggccacgggccccccttgtcccctgccatccgggtgcaggaggtggcgtggaagctcagctccaacaggtgccactcccgggagagccaggcagccatggcgggtcaggaggagacgtctcaggatgagacctatgaagtgaagatgaaccatgacacggaggcctgcagtgagcccagcctgctctccacagagatgctctcctaccaggatgacgaaaatcggcaactgacgctcccagaggaggacaagagggacatccggcaatctccgaagaggggtttcctccgctctgcctcactaggtcgaagggcctccttccacctggaatgtctgaagcgacagaaggaccgagggggagacatctctcagaagacagtcctgcccttgcatctggttcatcatcaggcattggcagtggcaggcctgagccccctcctccagagaagccattcccctgcctcattccctaggccttttgccaccccaccagccacacctggcagccgaggctggcccccacagcccgtccccaccctgcggcttgagggggtcgagtccagtgagaaactcaacagcagcttcccatccatccactgcggctcctgggctgagaccacccccggtggcgggggcagcagcgccgcccggagagtccggcccgtctccctcatggtgcccagccaggctggggccccagggaggcagttccacggcagtgccagcagcctggtggaagcggtcttgatttcagaaggactggggcagtttgctcaagatcccaagttcatcgaggtcaccacccaggagctggccgacgcctgcgacatgaccatagaggagatggagagcgcggccgacaacatcctcagcgggggcgccccacagagccccaatggcgccctcttaccctttgtgaactgcagggacgcggggcaggaccgagccgggggcgaagaggacgcgggctgtgtgcgcgcgcggggtcgaccgagtgaggaggagctccaggacagcagggtctacgtcagcagcctgtagtgggcgctgccagatgcgggcttttttttatttgtttcaatgttcctaatgggttcgtttcagaagtgcctcactgttctcgtgacctggagttaaccggaacagcgtcttcattcatttctgttgggaccagacgcggagcctgggtgcgcgagccgccctccgggaggaaggcgcccggctgcgtctgcagaggcggggagaggaggcggcgagggtcccggggcgcgaggaaggcgcctgccctctcccagctcgcaggccccgggcccggccgcgcctccgcggggagagcaccccggcttcccgcgcgccctcaccaaaaggaccctacagcaaacgggtgtctttcgactctgcttgtagaaaccatttgcacatattctgtacgagcctcgctgtctccctagagccagggccctgcggatttggagaagggagcggggcaggacttccaggaggaccccaacccggcccggagagggaggaggaggcctccaggggcgcggagctctggggatgggcgtcgggccggcagtggtgcggctcactccgtccctgcccacctgcgacgggatcccccgaccggcacgggccacgccgagctcccggccagccgccggcccgcaggcagcgcgagggaggagctgcgccgccggctccgcccaaccaggtggtgctgagcttccgctgagcgctcttttgttttgtggtttgacacttttcttgacagcatgttgcagtttcttttcggttttggttttttttaaatgttttattttgctttcccagcgggaggggaggaagaagagtgtttacaaagtcctgtagccccctcacctttctgttttcacttttgccaatgtacatcgggtttggttttcttgtattatttaaacggttgtggtttcctttttccacggaggttcaatagaagccgctgcaggagagttttaccaaccattgtgtatgcccaataatttgttatcatttccttaggtagtaacctatttttgttctggtttggttcggttatctaatggaaaggtaactggcaatgcacttgatgtggtcttgcacatgtgggtgatagagttgggttcctttttatgctgggtgtacaggtgggtttgggagagaggagcatgcgcgagagagtctccgagtgtgtgcgacgcgtgtgtgtgtggtgggttgtctgtgtgcatatgtcctgcccgtgtatatgcacccacaccatgtgcccgtgcacaccagtgactacgcagtcccccctttctggtttagctgtgggaagatctgaatctggggccgtttgaaagcaaaaacaaaccactgtctctgcttctgaaacgggaatcagtaactctttgcattttctgtcccacaagatatgcaaaaacaatgcaataatattcatttaaaaatacaattgtgagttgtgttggcattaaaactgtattttaaaaaaagacagaaatttaagggaaaaacacaagaaggcattttgcttcaatatattccgtgtaatgttttattgcattgataatgtttctgttgaagaaaccgttatacttgaattcaggtcagtttcagtatttttcaaatatttttttaaaactgaattgcaattgtgccaagcgaatataatgaattgaattaagttggttttcggattcacttcttgtatattttgctgcatgtaaagtaaatcattttgtatttggagtgtgacaagctttacctttgaactcaagtgcttttctatatgtggttgggggaaagggaacaagttttctttagtttgcacaatgagcaaaggtatcaccagtgtagtcattattctgctctccacaaacaggtttggacattactgttttgcatatcttgtgtttgcttacatttccctcaatttttccaaaatcgtttgctgggtatgtttgtaccgcctcttgctgtgagagaccaggacctattttattccagtcttcactctgtccactctgctctggtcatctgatttggtacttctccaagaacagcccttcactgtgaggtgcagggaggcgttctgatgagccctcagtcactgggccgtcatccgcatcccccatggaagaggtagctggctttcccttcccttccaccacacggaattttctctttggcttccttaggaaagtgtacactaaccgggaggataaaattaaagtcaggctgcttggagggaggggcatcctcacttccggattcttgttgctctacccaacaaggacagcaggggctcgagaaaggaactggtgaaaccctgatccatctgaaagtcaactctgcgtgctcctttctccatcccttcctcactctggagcagcctttccttcaggcttgccctaatgtttgggctgccggggagggggccaggacaagggaagaggcatccggagctcacagtgggggtgggaacagatttttgtgggggcatctctaatgctcacttatatctccctagaacatcactcttttggtgctgtgtccttcaaatgtatgtcaacagtggtggctgaaaagggactgctttggggaaaacaggacccaaccattcacccagaattgacccattaaatctcttccagtcctagtgttccctgagcccctcttggcacatatataagtaagctagaaattacaataagggacagtccattcctctatgacagcttgctggactgattcatgacaaagtggagaaatgtactcaatactccccggttaacacagtctagaaacagagtttctttatggatatccacacccaagtcatccaaactttcttgattccttttcactgccatcaaggtcctctagaaattgagtttaggtatcatcctttgaaaagttcccaagatttctaccaggaggtacacacaggcgttccctgtctagggcaggaggactatcctagcttgaccttctgatccactagaataagactggcgtatgatgcctgtcatcagaacagactggcacaagtagtgacatcaatgaaccacagcacaatcttccaagtgatgtctactctccacctaaaatggaattttccccatgaccttgtaaaacataattgtcacatcttccatacccctcctgacagcccccaagtgtcaggagaaaacagtcaggggctaagggcccaagggacttgaagaaacaacagtttaaggtctgcagtttggtcaacttaattcttgtcctccgaccagccctgcctctttcatttccagaccttggagaatttttcccagctttgattcagaaggtactagttataacccctttccttcttcttaatccaataggcctcactctcactgggaaatccactcaaaggaacaaggcaatgtctctcattctatttcccagttccaaattccaggtgcttgtctggagtgaagctacccgttactttctcccagcttttctccacccagcatgtctcctgcccatgcagctgaagacagtggggcaacctcaggagaagcagacctttccatgcccaagttcatctcctgagcaacagtgacacctagaaaatgaggactttggaagtcacccaaaagatggtggctactttatggagtcctgaagatacacagccaccactcctaaaggcaaagaaagaaaacacgaatgtaggtcagggatagagtggaaccctggtcatcggggtttttagcctcatcgtgggaaaggtggtaaaggaggatgatggcatctccatccctagaggccaagaattgaaatatcattgtcaaggattagaaacaattcagcaaagaggccacaaaaagggcctgctgactcccagaagacctctttaaaccccaggggaggcaaatacttgctgatggagtctgggccgtttccatattttaaagaagacctgcctctggggcaaatgtcagcacagagaggactgggaggagaatggaggcaagaaaagggcatattttgactccctctgtgcctcttcccagttcatggaaggatgtgttcagcttacccacccacagtgaccagtgtggtggagccgctgacatctcaaggatctatttgggaaggtgagaagagtactcattccatctgggggtgttgttccagccacatcagcctacctggtgggatgtgggggtgtctgccaccctgtcccccctctgctgatgtccctcccctcaggctgtccaggtgccacctgacacaggctgctgtgcaaagacaggcggggaagcccaaacctcactcccagggaggccctcagccgccagagtccaggttctccagaggctacgatttgaggaggttgagggggaagacaggagggaaagaaaagtcctacaactgtcaggaatggggcacctttccctgtccctaagcaaagctccctcttcccactgccctccccagccccagctccctgtcctccccaacacctagtgagaaagacggtgcgtggaagggagtcccatgggcagatgcttacacgacctctttgtgaagcctcttctgggtttaacttcattcatcaatttattcttatgtcaaagcaatgaaacttttctttctggagccagataccaatacaacaggtgaacgggtttctgccacatctctacattgacgggggatgcttgaacaacccccctcactacacagacacacaccgttaaggcacaagggctggggttgagctctagatgagggactttcctgctcctgcaagggtgagcactgtatacacagacaaggagggtgcagtagagtgactcccttggatggaagtagtaccatcagaacctactattattatgacataaattctatttacatacattgagagaatactacaatcaacactttttcctgggatgactttaagaggtttgagccacagcacctgaagtggcaaagatccatggtctttgtagggtattagagaactcttccagtcacctctgaaagcactctagatcttgcagctgagtggatgaagtgtaacaaatctgttgcacgctgagaggagtcagaattagcatttttcatgaaagttccccacgtctctactaagaatgaggaagaaaagactaagactaggtaattacacagaggcttgaaatgttacatcaccagagccaagtcctctcccttcagatcagttactggctgctacacagggacacccccaccttttcagggcatcccatgcactccacttctcaggatctaaggaatttgactttgtagggatcccagaaagggcactgtgccacttcccctggtgtgaatcagacatacattgtacattcatttctaaaattcactcatgcacctcaaaccaaggtcattatccaaaaaaaaaaaaaaaaagctctgggtggaagagtttgtaagttttaagagagggtcatttctatgtgaggaaatgcagaaatggacagaatgattcttattcactgtttgggtctggagaattcccattgtggaaatcttagagatctcaagtttattaccaagggaataaggaaaaaaaggtgagcaggcaccaggccaagcagtggctcccttgccaaggaacctgaggctgcaggtttcagggacccccttgaagaaacctctcctggccattggccaggagaaaagagaagtctctcctgtagagtcacaagagaagcaaaagagggtgggtcactgggtcctggacatagcccccaaccccaagacttcccaatatggagaaactacaccaatgtttaaaaggggaaaaggaaagaacttgtacatcaagggaagatgatttgtaaacacacagtcctgtgcagaaagatccccttcaggaggtgtctccagcatcccaaagctgtgcgcaccttctcttttcctgcctcaggccacctatgcatccagctgcagcccatacccacacctgaaatccatctcttgaatcccagccaggttatataccaccccattgccatgtcctgtcctggccagaatgcatgctgttcccccaagcctcgtgggagtgaggccatgggaaacagagatgagcatgtctggacaagtctgtgatggtagtggatgagaataacccatggcaaaacacgcacattcattaagaaatagggcgacagattccccgttggtgaagcactgaaaggtctattactctcataatattgctgttttattttaatccaccagagctaccatgcaaaactttcctcctgtgaaacgctccagataaagctcctctaatctccccttccctcatgtcctccagctcaaacccaccttcatcccccaaaccaatctgtatcatgcctgttatcagagaggcacagaaagatgggcagtgcctccgttgtcaccattccccacacccctacacacccccacaccctcccctccaggctccacgacttcacagtcttactgttgtaaatatcattgtacagtttgtaatcctcaaataatcccattgtcagaggcctcgcctgatgggccttctcaccctcgagaaaggccagggaatctagaaggggcaacccttcaaggagagcttcagggtcatctctgtgtgagacactattgtatattcctgtaagattgcatttttatctaaggaatgatgttatttaaaaaacaaacaaaaaacacaaaaaataagaattgcaaataaatttcttaacaatgtct

SEQ ID NO: 27 - protein, 2146 aa, Homo sapiens
  ref <308>: DATABASE ACCESSION NUMBER: NP_001123310.1
  ref <309>: DATABASE ENTRY DATE: 2014-05-14
  ref <313>: RELEVANT RESIDUES IN SEQ ID NO: (1)..(2146)
MVNENTRMYIPEENHQGSNYGSPRPAHANMNANAAAGLAPEHIPTPGAALSWQAAIDAARQAKLMGSAGNATISTVSSTQRKRQQYGKPKKQGSTTATRPPRALLCLTLKNPIRRACISIVEWKPFEIIILLTIFANCVALAIYIPFPEDDSNATNSNLERVEYLFLIIFTVEAFLKVIAYGLLFHPNAYLRNGWNLLDFIIVVVGLFSAILEQATKADGANALGGKGAGFDVKALRAFRVLRPLRLVSGVPSLQVVLNSIIKAMVPLLHIALLVLFVIIIYAIIGLELFMGKMHKTCYNQEGIADVPAEDDPSPCALETGHGRQCQNGTVCKPGWDGPKHGITNFDNFAFAMLTVFQCITMEGWTDVLYWVNDAVGRDWPWIYFVTLIIIGSFFVLNLVLGVLSGEFSKEREKAKARGDFQKLREKQQLEEDLKGYLDWITQAEDIDPENEDEGMDEEKPRNMSMPTSETESVNTENVAGGDIEGENCGARLAHRISKSKFSRYWRRWNRFCRRKCRAAVKSNVFYWLVIFLVFLNTLTIASEHYNQPNWLTEVQDTANKALLALFTAEMLLKMYSLGLQAYFVSLFNRFDCFVVCGGILETILVETKIMSPLGISVLRCVRLLRIFKITRYWNSLSNLVASLLNSVRSIASLLLLLFLFIIIFSLLGMQLFGGKFNFDEMQTRRSTFDNFPQSLLTVFQILTGEDWNSVMYDGIMAYGGPSFPGMLVCIYFIILFICGNYILLNVFLAIAVDNLADAESLTSAQKEEEEEKERKKLARTASPEKKQELVEKPAVGESKEEKIELKSITADGESPPATKINMDDLQPNENEDKSPYPNPETTGEEDEEEPEMPVGPRPRPLSELHLKEKAVPMPEASAFFIFSSNNRFRLQCHRIVNDTIFTNLILFFILLSSISLAAEDPVQHTSFRNHILGNADYVFTSIFTLEIILKMTAYGAFLHKGSFCRNYFNILDLLVVSVSLISFGIQSSAINVVKILRVLRVLRPLRAINRAKGLKHVVQCVFVAIRTIGNIVIVTTLLQFMFACIGVQLFKGKLYTCSDSSKQTEAECKGNYITYKDGEVDHPIIQPRSWENSKFDFDNVLAAMMALFTVSTFEGWPELLYRSIDSHTEDKGPIYNYRVEISIFFIIYIIIIAFFMMNIFVGFVIVTFQEQGEQEYKNCELDKNQRQCVEYALKARPLRRYIPKNQHQYKVWYVVNSTYFEYLMFVLILLNTICLAMQHYGQSCLFKIAMNILNMLFTGLFTVEMILKLIAFKPKHYFCDAWNTFDALIVVGSIVDIAITEVNNAEENSRISITFFRLFRVMRLVKLLSRGEGIRTLLWTFIKSFQALPYVALLIVMLFFIYAVIGMQVFGKIALNDTTEINRNNNFQTFPQAVLLLFRCATGEAWQDIMLACMPGKKCAPESEPSNSTEGETPCGSSFAVFYFISFYMLCAFLIINLFVAVIMDNFDYLTRDWSILGPHHLDEFKRIWAEYDPEAKGRIKHLDVVTLLRRIQPPLGFGKLCPHRVACKRLVSMNMPLNSDGTVMFNATLFALVRTALRIKTEEGPSPSEAHQGAEDPFRPAGNLEQANEELRAIIKKIWKRTSMKLLDQVVPPAGDDEVTVGKFYATFLIQEYFRKFKKRKEQGLVGKPSQRNALSLQAGLRTLHDIGPEIRRAISGDLTAEEELDKAMKEAVSAASEDDIFRRAGGLFGNHVSYYQSDGRSAFPQTFTTQRPLHINKAGSSQGDTESPSHEKLVDSTFTPSSYSSTGSNANINNANNTALGRLPRPAGYPSTVSTVEGHGPPLSPAIRVQEVAWKLSSNRCHSRESQAAMAGQEETSQDETYEVKMNHDTEACSEPSLLSTEMLSYQDDENRQLTLPEEDKRDIRQSPKRGFLRSASLGRRASFHLECLKRQKDRGGDISQKTVLPLHLVHHQALAVAGLSPLLQRSHSPASFPRPFATPPATPGSRGWPPQPVPTLRLEGVESSEKLNSSFPSIHCGSWAETTPGGGGSSAARRVRPVSLMVPSQAGAPGRQFHGSASSLVEAVLISEGLGQFAQDPKFIEVTTQELADACDMTIEEMESAADNILSGGAPQSPNGALLPFVNCRDAGQDRAGGEEDAGCVRARGRPSEEELQDSRVYVSSL

SEQ ID NO: 28 - DNA, 13498 bp, Homo sapiens
  ref <308>: DATABASE ACCESSION NUMBER: NCBI / NM_001129839.1
  ref <309>: DATABASE ENTRY DATE: 2014-05-14
  ref <313>: RELEVANT RESIDUES IN SEQ ID NO: (1)..(13498)
ttattttttcaaatggtgtagccgccggaggtgcggtgctcagttcttggaaggggcccggatgtactgaggatgcgttacagtttcactcgaggaggcagtagtggaaaggagcagtttttggggtttgatgccataatgggaatcaggtaatcgtcggcggggaagaagaaacgctgcagaccacggcttcctcgaatcttgcgcgaaagccgccggcctcggaggagggattaatccagacccgccggggggtgttttcacatttcttcctcttcgtggctgctcctcctattaaaaccatttttggtccatggtcaatgagaatacgaggatgtacattccagaggaaaaccaccaaggttccaactatgggagcccacgccccgcccatgccaacatgaatgccaatgcggcagcggggctggcccctgagcacatccccaccccgggggctgccctgtcgtggcaggcggccatcgacgcagcccggcaggctaagctgatgggcagcgctggcaatgcgaccatctccacagtcagctccacgcagcggaagcggcagcaatatgggaaacccaagaagcagggcagcaccacggccacacgcccgccccgagccctgctctgcctgaccctgaagaaccccatccggagggcctgcatcagcattgtcgaatggaaaccatttgaaataattattttactgactatttttgccaattgtgtggccttagcgatctatattccctttccagaagatgattccaacgccaccaattccaacctggaacgagtggaatatctctttctcataatttttacggtggaagcgtttttaaaagtaatcgcctatggactcctctttcaccccaatgcctacctccgcaacggctggaacctactagattttataattgtggttgtggggctttttagtgcaattttagaacaagcaaccaaagcagatggggcaaacgctctcggagggaaaggggccggatttgatgtgaaggcgctgagggccttccgcgtgctgcgccccctgcggctggtgtccggagtcccaagtctccaggtggtcctgaattccatcatcaaggccatggtccccctgctgcacatcgccctgcttgtgctgtttgtcatcatcatctacgccatcatcggcttggagctcttcatggggaagatgcacaagacctgctacaaccaggagggcatagcagatgttccagcagaagatgacccttccccttgtgcgctggaaacgggccacgggcggcagtgccagaacggcacggtgtgcaagcccggctgggatggtcccaagcacggcatcaccaactttgacaactttgccttcgccatgctcacggtgttccagtgcatcaccatggagggctggacggacgtgctgtactgggtcaatgatgccgtaggaagggactggccctggatctattttgttacactaatcatcatagggtcattttttgtacttaacttggttctcggtgtgcttagcggagagttttccaaagagagggagaaggccaaggcccggggagatttccagaagctgcgggagaagcagcagctagaagaggatctcaaaggctacctggattggatcactcaggccgaagacatcgatcctgagaatgaggacgaaggcatggatgaggagaagccccgaaacatgagcatgcccaccagtgagaccgagtccgtcaacaccgaaaacgtggctggaggtgacatcgagggagaaaactgcggggccaggctggcccaccggatctccaagtcaaagttcagccgctactggcgccggtggaatcggttctgcagaaggaagtgccgcgccgcagtcaagtctaatgtcttctactggctggtgattttcctggtgttcctcaacacgctcaccattgcctctgagcactacaaccagcccaactggctcacagaagtccaagacacggcaaacaaggccctgctggccctgttcacggcagagatgctcctgaagatgtacagcctgggcctgcaggcctacttcgtgtccctcttcaaccgctttgactgcttcgtcgtgtgtggcggcatcctggagaccatcctggtggagaccaagatcatgtccccactgggcatctccgtgctcagatgcgtccggctgctgaggattttcaagatcacgaggtactggaactccttgagcaacctggtggcatccttgctgaactctgtgcgctccatcgcctccctgctccttctcctcttcctcttcatcatcatcttctccctcctggggatgcagctctttggaggaaagttcaactttgatgagatgcagacccggaggagcacattcgataacttcccccagtccctcctcactgtgtttcagatcctgaccggggaggactggaattcggtgatgtatgatgggatcatggcttatggcggcccctcttttccagggatgttagtctgtatttacttcatcatcctcttcatctgtggaaactatatcctactgaatgtgttcttggccattgctgtggacaacctggctgatgctgagagcctcacatctgcccaaaaggaggaggaagaggagaaggagagaaagaagctggccaggactgccagcccagagaagaaacaagagttggtggagaagccggcagtgggggaatccaaggaggagaagattgagctgaaatccatcacggctgacggagagtctccacccgccaccaagatcaacatggatgacctccagcccaatgaaaatgaggataagagcccctaccccaacccagaaactacaggagaagaggatgaggaggagccagagatgcctgtcggccctcgcccacgaccactctctgagcttcaccttaaggaaaaggcagtgcccatgccagaagccagcgcgtttttcatcttcagctctaacaacaggtttcgcctccagtgccaccgcattgtcaatgacacgatcttcaccaacctgatcctcttcttcattctgctcagcagcatttccctggctgctgaggacccggtccagcacacctccttcaggaaccatattctgttttattttgatattgtttttaccaccattttcaccattgaaattgctctgaagatgactgcttatggggctttcttgcacaagggttctttctgccggaactacttcaacatcctggacctgctggtggtcagcgtgtccctcatctcctttggcatccagtccagtgcaatcaatgtcgtgaagatcttgcgagtcctgcgagtactcaggcccctgagggccatcaacagggccaaggggctaaagcatgtggttcagtgtgtgtttgtcgccatccggaccatcgggaacatcgtgattgtcaccaccctgctgcagttcatgtttgcctgcatcggggtccagctcttcaagggaaagctgtacacctgttcagacagttccaagcagacagaggcggaatgcaagggcaactacatcacgtacaaagacggggaggttgaccaccccatcatccaaccccgcagctgggagaacagcaagtttgactttgacaatgttctggcagccatgatggccctcttcaccgtctccaccttcgaagggtggccagagctgctgtaccgctccatcgactcccacacggaagacaagggccccatctacaactaccgtgtggagatctccatcttcttcatcatctacatcatcatcatcgccttcttcatgatgaacatcttcgtgggcttcgtcatcgtcacctttcaggagcagggggagcaggagtacaagaactgtgagctggacaagaaccagcgacagtgcgtggaatacgccctcaaggcccggcccctgcggaggtacatccccaagaaccagcaccagtacaaagtgtggtacgtggtcaactccacctacttcgagtacctgatgttcgtcctcatcctgctcaacaccatctgcctggccatgcagcactacggccagagctgcctgttcaaaatcgccatgaacatcctcaacatgctcttcactggcctcttcaccgtggagatgatcctgaagctcattgccttcaaacccaagcactatttctgtgatgcatggaatacatttgacgccttgattgttgtgggtagcattgttgatatagcaatcaccgagaacgcagaggaaaactcccgcatctccatcaccttcttccgcctgttccgggtcatgcgtctggtgaagctgctgagccgtggggagggcatccggacgctgctgtggaccttcatcaagtccttccaggccctgccctatgtggccctcctgatcgtgatgctgttcttcatctacgcggtgatcgggatgcaggtgtttgggaaaattgccctgaatgataccacagagatcaaccggaacaacaactttcagaccttcccccaggccgtgctgctcctcttcaggtgtgccaccggggaggcctggcaggacatcatgctggcctgcatgccaggcaagaagtgtgccccagagtccgagcccagcaacagcacggagggtgaaacaccctgtggtagcagctttgctgtcttctacttcatcagcttctacatgctctgtgccttcctgatcatcaacctctttgtagctgtcatcatggacaactttgactacctgacaagggactggtccatccttggtccccaccacctggatgagtttaaaagaatctgggcagagtatgaccctgaagccaagggtcgtatcaaacacctggatgtggtgaccctcctccggcggattcagccgccactaggttttgggaagctgtgccctcaccgcgtggcttgcaaacgcctggtctccatgaacatgcctctgaacagcgacgggacagtcatgttcaatgccaccctgtttgccctggtcaggacggccctgaggatcaaaacagaagagggacccagcccatcagaggcccaccaaggggctgaggatcctttccgccctgcagggaacctagaacaagccaatgaggagctgcgggcgatcatcaagaagatctggaagcggaccagcatgaagctgctggaccaggtggtgccccctgcaggtgatgatgaggtcaccgttggcaagttctacgccacgttcctgatccaggagtacttccggaagttcaagaagcgcaaagagcagggccttgtgggcaagccctcccagaggaacgcgctgtctctgcaggctggcttgcgcacactgcatgacatcgggcctgagatccgacgggccatctctggagatctcaccgctgaggaggagctggacaaggccatgaaggaggctgtgtccgctgcttctgaagatgacatcttcaggagggccggtggcctgttcggcaaccacgtcagctactaccaaagcgacggccggagcgccttcccccagaccttcaccactcagcgcccgctgcacatcaacaaggcgggcagcagccagggcgacactgagtcgccatcccacgagaagctggtggactccaccttcaccccgagcagctactcgtccaccggctccaacgccaacatcaacaacgccaacaacaccgccctgggtcgcctccctcgccccgccggctaccccagcacggtcagcactgtggagggccacgggccccccttgtcccctgccatccgggtgcaggaggtggcgtggaagctcagctccaacaggtgccactcccgggagagccaggcagccatggcgggtcaggaggagacgtctcaggatgagacctatgaagtgaagatgaaccatgacacggaggcctgcagtgagcccagcctgctctccacagagatgctctcctaccaggatgacgaaaatcggcaactgacgctcccagaggaggacaagagggacatccggcaatctccgaagaggggtttcctccgctctgcctcactaggtcgaagggcctccttccacctggaatgtctgaagcgacagaaggaccgagggggagacatctctcagaagacagtcctgcccttgcatctggttcatcatcaggcattggcagtggcaggcctgagccccctcctccagagaagccattcccctgcctcattccctaggccttttgccaccccaccagccacacctggcagccgaggctggcccccacagcccgtccccaccctgcggcttgagggggtcgagtccagtgagaaactcaacagcagcttcccatccatccactgcggctcctgggctgagaccacccccggtggcgggggcagcagcgccgcccggagagtccggcccgtctccctcatggtgcccagccaggctggggccccagggaggcagttccacggcagtgccagcagcctggtggaagcggtcttgatttcagaaggactggggcagtttgctcaagatcccaagttcatcgaggtcaccacccaggagctggccgacgcctgcgacatgaccatagaggagatggagagcgcggccgacaacatcctcagcgggggcgccccacagagccccaatggcgccctcttaccctttgtgaactgcagggacgcggggcaggaccgagccgggggcgaagaggacgcgggctgtgtgcgcgcgcggggtcgaccgagtgaggaggagctccaggacagcagggtctacgtcagcagcctgtagtgggcgctgccagatgcgggcttttttttatttgtttcaatgttcctaatgggttcgtttcagaagtgcctcactgttctcgtgacctggagttaaccggaacagcgtcttcattcatttctgttgggaccagacgcggagcctgggtgcgcgagccgccctccgggaggaaggcgcccggctgcgtctgcagaggcggggagaggaggcggcgagggtcccggggcgcgaggaaggcgcctgccctctcccagctcgcaggccccgggcccggccgcgcctccgcggggagagcaccccggcttcccgcgcgccctcaccaaaaggaccctacagcaaacgggtgtctttcgactctgcttgtagaaaccatttgcacatattctgtacgagcctcgctgtctccctagagccagggccctgcggatttggagaagggagcggggcaggacttccaggaggaccccaacccggcccggagagggaggaggaggcctccaggggcgcggagctctggggatgggcgtcgggccggcagtggtgcggctcactccgtccctgcccacctgcgacgggatcccccgaccggcacgggccacgccgagctcccggccagccgccggcccgcaggcagcgcgagggaggagctgcgccgccggctccgcccaaccaggtggtgctgagcttccgctgagcgctcttttgttttgtggtttgacacttttcttgacagcatgttgcagtttcttttcggttttggttttttttaaatgttttattttgctttcccagcgggaggggaggaagaagagtgtttacaaagtcctgtagccccctcacctttctgttttcacttttgccaatgtacatcgggtttggttttcttgtattatttaaacggttgtggtttcctttttccacggaggttcaatagaagccgctgcaggagagttttaccaaccattgtgtatgcccaataatttgttatcatttccttaggtagtaacctatttttgttctggtttggttcggttatctaatggaaaggtaactggcaatgcacttgatgtggtcttgcacatgtgggtgatagagttgggttcctttttatgctgggtgtacaggtgggtttgggagagaggagcatgcgcgagagagtctccgagtgtgtgcgacgcgtgtgtgtgtggtgggttgtctgtgtgcatatgtcctgcccgtgtatatgcacccacaccatgtgcccgtgcacaccagtgactacgcagtcccccctttctggtttagctgtgggaagatctgaatctggggccgtttgaaagcaaaaacaaaccactgtctctgcttctgaaacgggaatcagtaactctttgcattttctgtcccacaagatatgcaaaaacaatgcaataatattcatttaaaaatacaattgtgagttgtgttggcattaaaactgtattttaaaaaaagacagaaatttaagggaaaaacacaagaaggcattttgcttcaatatattccgtgtaatgttttattgcattgataatgtttctgttgaagaaaccgttatacttgaattcaggtcagtttcagtatttttcaaatatttttttaaaactgaattgcaattgtgccaagcgaatataatgaattgaattaagttggttttcggattcacttcttgtatattttgctgcatgtaaagtaaatcattttgtatttggagtgtgacaagctttacctttgaactcaagtgcttttctatatgtggttgggggaaagggaacaagttttctttagtttgcacaatgagcaaaggtatcaccagtgtagtcattattctgctctccacaaacaggtttggacattactgttttgcatatcttgtgtttgcttacatttccctcaatttttccaaaatcgtttgctgggtatgtttgtaccgcctcttgctgtgagagaccaggacctattttattccagtcttcactctgtccactctgctctggtcatctgatttggtacttctccaagaacagcccttcactgtgaggtgcagggaggcgttctgatgagccctcagtcactgggccgtcatccgcatcccccatggaagaggtagctggctttcccttcccttccaccacacggaattttctctttggcttccttaggaaagtgtacactaaccgggaggataaaattaaagtcaggctgcttggagggaggggcatcctcacttccggattcttgttgctctacccaacaaggacagcaggggctcgagaaaggaactggtgaaaccctgatccatctgaaagtcaactctgcgtgctcctttctccatcccttcctcactctggagcagcctttccttcaggcttgccctaatgtttgggctgccggggagggggccaggacaagggaagaggcatccggagctcacagtgggggtgggaacagatttttgtgggggcatctctaatgctcacttatatctccctagaacatcactcttttggtgctgtgtccttcaaatgtatgtcaacagtggtggctgaaaagggactgctttggggaaaacaggacccaaccattcacccagaattgacccattaaatctcttccagtcctagtgttccctgagcccctcttggcacatatataagtaagctagaaattacaataagggacagtccattcctctatgacagcttgctggactgattcatgacaaagtggagaaatgtactcaatactccccggttaacacagtctagaaacagagtttctttatggatatccacacccaagtcatccaaactttcttgattccttttcactgccatcaaggtcctctagaaattgagtttaggtatcatcctttgaaaagttcccaagatttctaccaggaggtacacacaggcgttccctgtctagggcaggaggactatcctagcttgaccttctgatccactagaataagactggcgtatgatgcctgtcatcagaacagactggcacaagtagtgacatcaatgaaccacagcacaatcttccaagtgatgtctactctccacctaaaatggaattttccccatgaccttgtaaaacataattgtcacatcttccatacccctcctgacagcccccaagtgtcaggagaaaacagtcaggggctaagggcccaagggacttgaagaaacaacagtttaaggtctgcagtttggtcaacttaattcttgtcctccgaccagccctgcctctttcatttccagaccttggagaatttttcccagctttgattcagaaggtactagttataacccctttccttcttcttaatccaataggcctcactctcactgggaaatccactcaaaggaacaaggcaatgtctctcattctatttcccagttccaaattccaggtgcttgtctggagtgaagctacccgttactttctcccagcttttctccacccagcatgtctcctgcccatgcagctgaagacagtggggcaacctcaggagaagcagacctttccatgcccaagttcatctcctgagcaacagtgacacctagaaaatgaggactttggaagtcacccaaaagatggtggctactttatggagtcctgaagatacacagccaccactcctaaaggcaaagaaagaaaacacgaatgtaggtcagggatagagtggaaccctggtcatcggggtttttagcctcatcgtgggaaaggtggtaaaggaggatgatggcatctccatccctagaggccaagaattgaaatatcattgtcaaggattagaaacaattcagcaaagaggccacaaaaagggcctgctgactcccagaagacctctttaaaccccaggggaggcaaatacttgctgatggagtctgggccgtttccatattttaaagaagacctgcctctggggcaaatgtcagcacagagaggactgggaggagaatggaggcaagaaaagggcatattttgactccctctgtgcctcttcccagttcatggaaggatgtgttcagcttacccacccacagtgaccagtgtggtggagccgctgacatctcaaggatctatttgggaaggtgagaagagtactcattccatctgggggtgttgttccagccacatcagcctacctggtgggatgtgggggtgtctgccaccctgtcccccctctgctgatgtccctcccctcaggctgtccaggtgccacctgacacaggctgctgtgcaaagacaggcggggaagcccaaacctcactcccagggaggccctcagccgccagagtccaggttctccagaggctacgatttgaggaggttgagggggaagacaggagggaaagaaaagtcctacaactgtcaggaatggggcacctttccctgtccctaagcaaagctccctcttcccactgccctccccagccccagctccctgtcctccccaacacctagtgagaaagacggtgcgtggaagggagtcccatgggcagatgcttacacgacctctttgtgaagcctcttctgggtttaacttcattcatcaatttattcttatgtcaaagcaatgaaacttttctttctggagccagataccaatacaacaggtgaacgggtttctgccacatctctacattgacgggggatgcttgaacaacccccctcactacacagacacacaccgttaaggcacaagggctggggttgagctctagatgagggactttcctgctcctgcaagggtgagcactgtatacacagacaaggagggtgcagtagagtgactcccttggatggaagtagtaccatcagaacctactattattatgacataaattctatttacatacattgagagaatactacaatcaacactttttcctgggatgactttaagaggtttgagccacagcacctgaagtggcaaagatccatggtctttgtagggtattagagaactcttccagtcacctctgaaagcactctagatcttgcagctgagtggatgaagtgtaacaaatctgttgcacgctgagaggagtcagaattagcatttttcatgaaagttccccacgtctctactaagaatgaggaagaaaagactaagactaggtaattacacagaggcttgaaatgttacatcaccagagccaagtcctctcccttcagatcagttactggctgctacacagggacacccccaccttttcagggcatcccatgcactccacttctcaggatctaaggaatttgactttgtagggatcccagaaagggcactgtgccacttcccctggtgtgaatcagacatacattgtacattcatttctaaaattcactcatgcacctcaaaccaaggtcattatccaaaaaaaaaaaaaaaaagctctgggtggaagagtttgtaagttttaagagagggtcatttctatgtgaggaaatgcagaaatggacagaatgattcttattcactgtttgggtctggagaattcccattgtggaaatcttagagatctcaagtttattaccaagggaataaggaaaaaaaggtgagcaggcaccaggccaagcagtggctcccttgccaaggaacctgaggctgcaggtttcagggacccccttgaagaaacctctcctggccattggccaggagaaaagagaagtctctcctgtagagtcacaagagaagcaaaagagggtgggtcactgggtcctggacatagcccccaaccccaagacttcccaatatggagaaactacaccaatgtttaaaaggggaaaaggaaagaacttgtacatcaagggaagatgatttgtaaacacacagtcctgtgcagaaagatccccttcaggaggtgtctccagcatcccaaagctgtgcgcaccttctcttttcctgcctcaggccacctatgcatccagctgcagcccatacccacacctgaaatccatctcttgaatcccagccaggttatataccaccccattgccatgtcctgtcctggccagaatgcatgctgttcccccaagcctcgtgggagtgaggccatgggaaacagagatgagcatgtctggacaagtctgtgatggtagtggatgagaataacccatggcaaaacacgcacattcattaagaaatagggcgacagattccccgttggtgaagcactgaaaggtctattactctcataatattgctgttttattttaatccaccagagctaccatgcaaaactttcctcctgtgaaacgctccagataaagctcctctaatctccccttccctcatgtcctccagctcaaacccaccttcatcccccaaaccaatctgtatcatgcctgttatcagagaggcacagaaagatgggcagtgcctccgttgtcaccattccccacacccctacacacccccacaccctcccctccaggctccacgacttcacagtcttactgttgtaaatatcattgtacagtttgtaatcctcaaataatcccattgtcagaggcctcgcctgatgggccttctcaccctcgagaaaggccagggaatctagaaggggcaacccttcaaggagagcttcagggtcatctctgtgtgagacactattgtatattcctgtaagattgcatttttatctaaggaatgatgttatttaaaaaacaaacaaaaaacacaaaaaataagaattgcaaataaatttcttaacaatgtct

SEQ ID NO: 29 - protein, 2144 aa, Homo sapiens
  ref <308>: DATABASE ACCESSION NUMBER: NCBI / NP_001123311.1
  ref <309>: DATABASE ENTRY DATE: 2014-05-14
  ref <313>: RELEVANT RESIDUES IN SEQ ID NO: (1)..(2144)
MVNENTRMYIPEENHQGSNYGSPRPAHANMNANAAAGLAPEHIPTPGAALSWQAAIDAARQAKLMGSAGNATISTVSSTQRKRQQYGKPKKQGSTTATRPPRALLCLTLKNPIRRACISIVEWKPFEIIILLTIFANCVALAIYIPFPEDDSNATNSNLERVEYLFLIIFTVEAFLKVIAYGLLFHPNAYLRNGWNLLDFIIVVVGLFSAILEQATKADGANALGGKGAGFDVKALRAFRVLRPLRLVSGVPSLQVVLNSIIKAMVPLLHIALLVLFVIIIYAIIGLELFMGKMHKTCYNQEGIADVPAEDDPSPCALETGHGRQCQNGTVCKPGWDGPKHGITNFDNFAFAMLTVFQCITMEGWTDVLYWVNDAVGRDWPWIYFVTLIIIGSFFVLNLVLGVLSGEFSKEREKAKARGDFQKLREKQQLEEDLKGYLDWITQAEDIDPENEDEGMDEEKPRNMSMPTSETESVNTENVAGGDIEGENCGARLAHRISKSKFSRYWRRWNRFCRRKCRAAVKSNVFYWLVIFLVFLNTLTIASEHYNQPNWLTEVQDTANKALLALFTAEMLLKMYSLGLQAYFVSLFNRFDCFVVCGGILETILVETKIMSPLGISVLRCVRLLRIFKITRYWNSLSNLVASLLNSVRSIASLLLLLFLFIIIFSLLGMQLFGGKFNFDEMQTRRSTFDNFPQSLLTVFQILTGEDWNSVMYDGIMAYGGPSFPGMLVCIYFIILFICGNYILLNVFLAIAVDNLADAESLTSAQKEEEEEKERKKLARTASPEKKQELVEKPAVGESKEEKIELKSITADGESPPATKINMDDLQPNENEDKSPYPNPETTGEEDEEEPEMPVGPRPRPLSELHLKEKAVPMPEASAFFIFSSNNRFRLQCHRIVNDTIFTNLILFFILLSSISLAAEDPVQHTSFRNHILFYFDIVFTTIFTIEIALKMTAYGAFLHKGSFCRNYFNILDLLVVSVSLISFGIQSSAINVVKILRVLRVLRPLRAINRAKGLKHVVQCVFVAIRTIGNIVIVTTLLQFMFACIGVQLFKGKLYTCSDSSKQTEAECKGNYITYKDGEVDHPIIQPRSWENSKFDFDNVLAAMMALFTVSTFEGWPELLYRSIDSHTEDKGPIYNYRVEISIFFIIYIIIIAFFMMNIFVGFVIVTFQEQGEQEYKNCELDKNQRQCVEYALKARPLRRYIPKNQHQYKVWYVVNSTYFEYLMFVLILLNTICLAMQHYGQSCLFKIAMNILNMLFTGLFTVEMILKLIAFKPKHYFCDAWNTFDALIVVGSIVDIAITENAEENSRISITFFRLFRVMRLVKLLSRGEGIRTLLWTFIKSFQALPYVALLIVMLFFIYAVIGMQVFGKIALNDTTEINRNNNFQTFPQAVLLLFRCATGEAWQDIMLACMPGKKCAPESEPSNSTEGETPCGSSFAVFYFISFYMLCAFLIINLFVAVIMDNFDYLTRDWSILGPHHLDEFKRIWAEYDPEAKGRIKHLDVVTLLRRIQPPLGFGKLCPHRVACKRLVSMNMPLNSDGTVMFNATLFALVRTALRIKTEEGPSPSEAHQGAEDPFRPAGNLEQANEELRAIIKKIWKRTSMKLLDQVVPPAGDDEVTVGKFYATFLIQEYFRKFKKRKEQGLVGKPSQRNALSLQAGLRTLHDIGPEIRRAISGDLTAEEELDKAMKEAVSAASEDDIFRRAGGLFGNHVSYYQSDGRSAFPQTFTTQRPLHINKAGSSQGDTESPSHEKLVDSTFTPSSYSSTGSNANINNANNTALGRLPRPAGYPSTVSTVEGHGPPLSPAIRVQEVAWKLSSNRCHSRESQAAMAGQEETSQDETYEVKMNHDTEACSEPSLLSTEMLSYQDDENRQLTLPEEDKRDIRQSPKRGFLRSASLGRRASFHLECLKRQKDRGGDISQKTVLPLHLVHHQALAVAGLSPLLQRSHSPASFPRPFATPPATPGSRGWPPQPVPTLRLEGVESSEKLNSSFPSIHCGSWAETTPGGGGSSAARRVRPVSLMVPSQAGAPGRQFHGSASSLVEAVLISEGLGQFAQDPKFIEVTTQELADACDMTIEEMESAADNILSGGAPQSPNGALLPFVNCRDAGQDRAGGEEDAGCVRARGRPSEEELQDSRVYVSSL

SEQ ID NO: 30 - DNA, 13480 bp, Homo sapiens
  ref <308>: DATABASE ACCESSION NUMBER: NCBI / NM_001129840.1
  ref <309>: DATABASE ENTRY DATE: 2014-05-14
  ref <313>: RELEVANT RESIDUES IN SEQ ID NO: (1)..(13480)
ttattttttcaaatggtgtagccgccggaggtgcggtgctcagttcttggaaggggcccggatgtactgaggatgcgttacagtttcactcgaggaggcagtagtggaaaggagcagtttttggggtttgatgccataatgggaatcaggtaatcgtcggcggggaagaagaaacgctgcagaccacggcttcctcgaatcttgcgcgaaagccgccggcctcggaggagggattaatccagacccgccggggggtgttttcacatttcttcctcttcgtggctgctcctcctattaaaaccatttttggtccatggtcaatgagaatacgaggatgtacattccagaggaaaaccaccaaggttccaactatgggagcccacgccccgcccatgccaacatgaatgccaatgcggcagcggggctggcccctgagcacatccccaccccgggggctgccctgtcgtggcaggcggccatcgacgcagcccggcaggctaagctgatgggcagcgctggcaatgcgaccatctccacagtcagctccacgcagcggaagcggcagcaatatgggaaacccaagaagcagggcagcaccacggccacacgcccgccccgagccctgctctgcctgaccctgaagaaccccatccggagggcctgcatcagcattgtcgaatggaaaccatttgaaataattattttactgactatttttgccaattgtgtggccttagcgatctatattccctttccagaagatgattccaacgccaccaattccaacctggaacgagtggaatatctctttctcataatttttacggtggaagcgtttttaaaagtaatcgcctatggactcctctttcaccccaatgcctacctccgcaacggctggaacctactagattttataattgtggttgtggggctttttagtgcaattttagaacaagcaaccaaagcagatggggcaaacgctctcggagggaaaggggccggatttgatgtgaaggcgctgagggccttccgcgtgctgcgccccctgcggctggtgtccggagtcccaagtctccaggtggtcctgaattccatcatcaaggccatggtccccctgctgcacatcgccctgcttgtgctgtttgtcatcatcatctacgccatcatcggcttggagctcttcatggggaagatgcacaagacctgctacaaccaggagggcatagcagatgttccagcagaagatgacccttccccttgtgcgctggaaacgggccacgggcggcagtgccagaacggcacggtgtgcaagcccggctgggatggtcccaagcacggcatcaccaactttgacaactttgccttcgccatgctcacggtgttccagtgcatcaccatggagggctggacggacgtgctgtactggatgcaggacgctatgggctatgagttaccctgggtgtattttgtcagtctggtcatctttggatcctttttcgttctaaatctggttctcggtgtgttgagcggagagttttccaaagagagggagaaggccaaggcccggggagatttccagaagctgcgggagaagcagcagctagaagaggatctcaaaggctacctggattggatcactcaggccgaagacatcgatcctgagaatgaggacgaaggcatggatgaggagaagccccgaaacatgagcatgcccaccagtgagaccgagtccgtcaacaccgaaaacgtggctggaggtgacatcgagggagaaaactgcggggccaggctggcccaccggatctccaagtcaaagttcagccgctactggcgccggtggaatcggttctgcagaaggaagtgccgcgccgcagtcaagtctaatgtcttctactggctggtgattttcctggtgttcctcaacacgctcaccattgcctctgagcactacaaccagcccaactggctcacagaagtccaagacacggcaaacaaggccctgctggccctgttcacggcagagatgctcctgaagatgtacagcctgggcctgcaggcctacttcgtgtccctcttcaaccgctttgactgcttcgtcgtgtgtggcggcatcctggagaccatcctggtggagaccaagatcatgtccccactgggcatctccgtgctcagatgcgtccggctgctgaggattttcaagatcacgaggtactggaactccttgagcaacctggtggcatccttgctgaactctgtgcgctccatcgcctccctgctccttctcctcttcctcttcatcatcatcttctccctcctggggatgcagctctttggaggaaagttcaactttgatgagatgcagacccggaggagcacattcgataacttcccccagtccctcctcactgtgtttcagatcctgaccggggaggactggaattcggtgatgtatgatgggatcatggcttatggcggcccctcttttccagggatgttagtctgtatttacttcatcatcctcttcatctgtggaaactatatcctactgaatgtgttcttggccattgctgtggacaacctggctgatgctgagagcctcacatctgcccaaaaggaggaggaagaggagaaggagagaaagaagctggccaggactgccagcccagagaagaaacaagagttggtggagaagccggcagtgggggaatccaaggaggagaagattgagctgaaatccatcacggctgacggagagtctccacccgccaccaagatcaacatggatgacctccagcccaatgaaaatgaggataagagcccctaccccaacccagaaactacaggagaagaggatgaggaggagccagagatgcctgtcggccctcgcccacgaccactctctgagcttcaccttaaggaaaaggcagtgcccatgccagaagccagcgcgtttttcatcttcagctctaacaacaggtttcgcctccagtgccaccgcattgtcaatgacacgatcttcaccaacctgatcctcttcttcattctgctcagcagcatttccctggctgctgaggacccggtccagcacacctccttcaggaaccatatcctaggcaatgcagactatgtcttcactagtatctttacattagaaattatccttaagatgactgcttatggggctttcttgcacaagggttctttctgccggaactacttcaacatcctggacctgctggtggtcagcgtgtccctcatctcctttggcatccagtccagtgcaatcaatgtcgtgaagatcttgcgagtcctgcgagtactcaggcccctgagggccatcaacagggccaaggggctaaagcatgtggttcagtgtgtgtttgtcgccatccggaccatcgggaacatcgtgattgtcaccaccctgctgcagttcatgtttgcctgcatcggggtccagctcttcaagggaaagctgtacacctgttcagacagttccaagcagacagaggcggaatgcaagggcaactacatcacgtacaaagacggggaggttgaccaccccatcatccaaccccgcagctgggagaacagcaagtttgactttgacaatgttctggcagccatgatggccctcttcaccgtctccaccttcgaagggtggccagagctgctgtaccgctccatcgactcccacacggaagacaagggccccatctacaactaccgtgtggagatctccatcttcttcatcatctacatcatcatcatcgccttcttcatgatgaacatcttcgtgggcttcgtcatcgtcacctttcaggagcagggggagcaggagtacaagaactgtgagctggacaagaaccagcgacagtgcgtggaatacgccctcaaggcccggcccctgcggaggtacatccccaagaaccagcaccagtacaaagtgtggtacgtggtcaactccacctacttcgagtacctgatgttcgtcctcatcctgctcaacaccatctgcctggccatgcagcactacggccagagctgcctgttcaaaatcgccatgaacatcctcaacatgctcttcactggcctcttcaccgtggagatgatcctgaagctcattgccttcaaacccaagcactatttctgtgatgcatggaatacatttgacgccttgattgttgtgggtagcattgttgatatagcaatcaccgaggtaaacccagctgaacatacccaatgctctccctctatgaacgcagaggaaaactcccgcatctccatcaccttcttccgcctgttccgggtcatgcgtctggtgaagctgctgagccgtggggagggcatccggacgctgctgtggaccttcatcaagtccttccaggccctgccctatgtggccctcctgatcgtgatgctgttcttcatctacgcggtgatcgggatgcaggtgtttgggaaaattgccctgaatgataccacagagatcaaccggaacaacaactttcagaccttcccccaggccgtgctgctcctcttcaggtgtgccaccggggaggcctggcaggacatcatgctggcctgcatgccaggcaagaagtgtgccccagagtccgagcccagcaacagcacggagggtgaaacaccctgtggtagcagctttgctgtcttctacttcatcagcttctacatgctctgtgccttcctgatcatcaacctctttgtagctgtcatcatggacaactttgactacctgacaagggactggtccatccttggtccccaccacctggatgagtttaaaagaatctgggcagagtatgaccctgaagccaagggtcgtatcaaacacctggatgtggtgaccctcctccggcggattcagccgccactaggttttgggaagctgtgccctcaccgcgtggcttgcaaacgcctggtctccatgaacatgcctctgaacagcgacgggacagtcatgttcaatgccaccctgtttgccctggtcaggacggccctgaggatcaaaacagaagggaacctagaacaagccaatgaggagctgcgggcgatcatcaagaagatctggaagcggaccagcatgaagctgctggaccaggtggtgccccctgcaggtgatgatgaggtcaccgttggcaagttctacgccacgttcctgatccaggagtacttccggaagttcaagaagcgcaaagagcagggccttgtgggcaagccctcccagaggaacgcgctgtctctgcaggctggcttgcgcacactgcatgacatcgggcctgagatccgacgggccatctctggagatctcaccgctgaggaggagctggacaaggccatgaaggaggctgtgtccgctgcttctgaagatgacatcttcaggagggccggtggcctgttcggcaaccacgtcagctactaccaaagcgacggccggagcgccttcccccagaccttcaccactcagcgcccgctgcacatcaacaaggcgggcagcagccagggcgacactgagtcgccatcccacgagaagctggtggactccaccttcaccccgagcagctactcgtccaccggctccaacgccaacatcaacaacgccaacaacaccgccctgggtcgcctccctcgccccgccggctaccccagcacggtcagcactgtggagggccacgggccccccttgtcccctgccatccgggtgcaggaggtggcgtggaagctcagctccaacaggtgccactcccgggagagccaggcagccatggcgggtcaggaggagacgtctcaggatgagacctatgaagtgaagatgaaccatgacacggaggcctgcagtgagcccagcctgctctccacagagatgctctcctaccaggatgacgaaaatcggcaactgacgctcccagaggaggacaagagggacatccggcaatctccgaagaggggtttcctccgctctgcctcactaggtcgaagggcctccttccacctggaatgtctgaagcgacagaaggaccgagggggagacatctctcagaagacagtcctgcccttgcatctggttcatcatcaggcattggcagtggcaggcctgagccccctcctccagagaagccattcccctgcctcattccctaggccttttgccaccccaccagccacacctggcagccgaggctggcccccacagcccgtccccaccctgcggcttgagggggtcgagtccagtgagaaactcaacagcagcttcccatccatccactgcggctcctgggctgagaccacccccggtggcgggggcagcagcgccgcccggagagtccggcccgtctccctcatggtgcccagccaggctggggccccagggaggcagttccacggcagtgccagcagcctggtggaagcggtcttgatttcagaaggactggggcagtttgctcaagatcccaagttcatcgaggtcaccacccaggagctggccgacgcctgcgacatgaccatagaggagatggagagcgcggccgacaacatcctcagcgggggcgccccacagagccccaatggcgccctcttaccctttgtgaactgcagggacgcggggcaggaccgagccgggggcgaagaggacgcgggctgtgtgcgcgcgcggggtcgaccgagtgaggaggagctccaggacagcagggtctacgtcagcagcctgtagtgggcgctgccagatgcgggcttttttttatttgtttcaatgttcctaatgggttcgtttcagaagtgcctcactgttctcgtgacctggagttaaccggaacagcgtcttcattcatttctgttgggaccagacgcggagcctgggtgcgcgagccgccctccgggaggaaggcgcccggctgcgtctgcagaggcggggagaggaggcggcgagggtcccggggcgcgaggaaggcgcctgccctctcccagctcgcaggccccgggcccggccgcgcctccgcggggagagcaccccggcttcccgcgcgccctcaccaaaaggaccctacagcaaacgggtgtctttcgactctgcttgtagaaaccatttgcacatattctgtacgagcctcgctgtctccctagagccagggccctgcggatttggagaagggagcggggcaggacttccaggaggaccccaacccggcccggagagggaggaggaggcctccaggggcgcggagctctggggatgggcgtcgggccggcagtggtgcggctcactccgtccctgcccacctgcgacgggatcccccgaccggcacgggccacgccgagctcccggccagccgccggcccgcaggcagcgcgagggaggagctgcgccgccggctccgcccaaccaggtggtgctgagcttccgctgagcgctcttttgttttgtggtttgacacttttcttgacagcatgttgcagtttcttttcggttttggttttttttaaatgttttattttgctttcccagcgggaggggaggaagaagagtgtttacaaagtcctgtagccccctcacctttctgttttcacttttgccaatgtacatcgggtttggttttcttgtattatttaaacggttgtggtttcctttttccacggaggttcaatagaagccgctgcaggagagttttaccaaccattgtgtatgcccaataatttgttatcatttccttaggtagtaacctatttttgttctggtttggttcggttatctaatggaaaggtaactggcaatgcacttgatgtggtcttgcacatgtgggtgatagagttgggttcctttttatgctgggtgtacaggtgggtttgggagagaggagcatgcgcgagagagtctccgagtgtgtgcgacgcgtgtgtgtgtggtgggttgtctgtgtgcatatgtcctgcccgtgtatatgcacccacaccatgtgcccgtgcacaccagtgactacgcagtcccccctttctggtttagctgtgggaagatctgaatctggggccgtttgaaagcaaaaacaaaccactgtctctgcttctgaaacgggaatcagtaactctttgcattttctgtcccacaagatatgcaaaaacaatgcaataatattcatttaaaaatacaattgtgagttgtgttggcattaaaactgtattttaaaaaaagacagaaatttaagggaaaaacacaagaaggcattttgcttcaatatattccgtgtaatgttttattgcattgataatgtttctgttgaagaaaccgttatacttgaattcaggtcagtttcagtatttttcaaatatttttttaaaactgaattgcaattgtgccaagcgaatataatgaattgaattaagttggttttcggattcacttcttgtatattttgctgcatgtaaagtaaatcattttgtatttggagtgtgacaagctttacctttgaactcaagtgcttttctatatgtggttgggggaaagggaacaagttttctttagtttgcacaatgagcaaaggtatcaccagtgtagtcattattctgctctccacaaacaggtttggacattactgttttgcatatcttgtgtttgcttacatttccctcaatttttccaaaatcgtttgctgggtatgtttgtaccgcctcttgctgtgagagaccaggacctattttattccagtcttcactctgtccactctgctctggtcatctgatttggtacttctccaagaacagcccttcactgtgaggtgcagggaggcgttctgatgagccctcagtcactgggccgtcatccgcatcccccatggaagaggtagctggctttcccttcccttccaccacacggaattttctctttggcttccttaggaaagtgtacactaaccgggaggataaaattaaagtcaggctgcttggagggaggggcatcctcacttccggattcttgttgctctacccaacaaggacagcaggggctcgagaaaggaactggtgaaaccctgatccatctgaaagtcaactctgcgtgctcctttctccatcccttcctcactctggagcagcctttccttcaggcttgccctaatgtttgggctgccggggagggggccaggacaagggaagaggcatccggagctcacagtgggggtgggaacagatttttgtgggggcatctctaatgctcacttatatctccctagaacatcactcttttggtgctgtgtccttcaaatgtatgtcaacagtggtggctgaaaagggactgctttggggaaaacaggacccaaccattcacccagaattgacccattaaatctcttccagtcctagtgttccctgagcccctcttggcacatatataagtaagctagaaattacaataagggacagtccattcctctatgacagcttgctggactgattcatgacaaagtggagaaatgtactcaatactccccggttaacacagtctagaaacagagtttctttatggatatccacacccaagtcatccaaactttcttgattccttttcactgccatcaaggtcctctagaaattgagtttaggtatcatcctttgaaaagttcccaagatttctaccaggaggtacacacaggcgttccctgtctagggcaggaggactatcctagcttgaccttctgatccactagaataagactggcgtatgatgcctgtcatcagaacagactggcacaagtagtgacatcaatgaaccacagcacaatcttccaagtgatgtctactctccacctaaaatggaattttccccatgaccttgtaaaacataattgtcacatcttccatacccctcctgacagcccccaagtgtcaggagaaaacagtcaggggctaagggcccaagggacttgaagaaacaacagtttaaggtctgcagtttggtcaacttaattcttgtcctccgaccagccctgcctctttcatttccagaccttggagaatttttcccagctttgattcagaaggtactagttataacccctttccttcttcttaatccaataggcctcactctcactgggaaatccactcaaaggaacaaggcaatgtctctcattctatttcccagttccaaattccaggtgcttgtctggagtgaagctacccgttactttctcccagcttttctccacccagcatgtctcctgcccatgcagctgaagacagtggggcaacctcaggagaagcagacctttccatgcccaagttcatctcctgagcaacagtgacacctagaaaatgaggactttggaagtcacccaaaagatggtggctactttatggagtcctgaagatacacagccaccactcctaaaggcaaagaaagaaaacacgaatgtaggtcagggatagagtggaaccctggtcatcggggtttttagcctcatcgtgggaaaggtggtaaaggaggatgatggcatctccatccctagaggccaagaattgaaatatcattgtcaaggattagaaacaattcagcaaagaggccacaaaaagggcctgctgactcccagaagacctctttaaaccccaggggaggcaaatacttgctgatggagtctgggccgtttccatattttaaagaagacctgcctctggggcaaatgtcagcacagagaggactgggaggagaatggaggcaagaaaagggcatattttgactccctctgtgcctcttcccagttcatggaaggatgtgttcagcttacccacccacagtgaccagtgtggtggagccgctgacatctcaaggatctatttgggaaggtgagaagagtactcattccatctgggggtgttgttccagccacatcagcctacctggtgggatgtgggggtgtctgccaccctgtcccccctctgctgatgtccctcccctcaggctgtccaggtgccacctgacacaggctgctgtgcaaagacaggcggggaagcccaaacctcactcccagggaggccctcagccgccagagtccaggttctccagaggctacgatttgaggaggttgagggggaagacaggagggaaagaaaagtcctacaactgtcaggaatggggcacctttccctgtccctaagcaaagctccctcttcccactgccctccccagccccagctccctgtcctccccaacacctagtgagaaagacggtgcgtggaagggagtcccatgggcagatgcttacacgacctctttgtgaagcctcttctgggtttaacttcattcatcaatttattcttatgtcaaagcaatgaaacttttctttctggagccagataccaatacaacaggtgaacgggtttctgccacatctctacattgacgggggatgcttgaacaacccccctcactacacagacacacaccgttaaggcacaagggctggggttgagctctagatgagggactttcctgctcctgcaagggtgagcactgtatacacagacaaggagggtgcagtagagtgactcccttggatggaagtagtaccatcagaacctactattattatgacataaattctatttacatacattgagagaatactacaatcaacactttttcctgggatgactttaagaggtttgagccacagcacctgaagtggcaaagatccatggtctttgtagggtattagagaactcttccagtcacctctgaaagcactctagatcttgcagctgagtggatgaagtgtaacaaatctgttgcacgctgagaggagtcagaattagcatttttcatgaaagttccccacgtctctactaagaatgaggaagaaaagactaagactaggtaattacacagaggcttgaaatgttacatcaccagagccaagtcctctcccttcagatcagttactggctgctacacagggacacccccaccttttcagggcatcccatgcactccacttctcaggatctaaggaatttgactttgtagggatcccagaaagggcactgtgccacttcccctggtgtgaatcagacatacattgtacattcatttctaaaattcactcatgcacctcaaaccaaggtcattatccaaaaaaaaaaaaaaaaagctctgggtggaagagtttgtaagttttaagagagggtcatttctatgtgaggaaatgcagaaatggacagaatgattcttattcactgtttgggtctggagaattcccattgtggaaatcttagagatctcaagtttattaccaagggaataaggaaaaaaaggtgagcaggcaccaggccaagcagtggctcccttgccaaggaacctgaggctgcaggtttcagggacccccttgaagaaacctctcctggccattggccaggagaaaagagaagtctctcctgtagagtcacaagagaagcaaaagagggtgggtcactgggtcctggacatagcccccaaccccaagacttcccaatatggagaaactacaccaatgtttaaaaggggaaaaggaaagaacttgtacatcaagggaagatgatttgtaaacacacagtcctgtgcagaaagatccccttcaggaggtgtctccagcatcccaaagctgtgcgcaccttctcttttcctgcctcaggccacctatgcatccagctgcagcccatacccacacctgaaatccatctcttgaatcccagccaggttatataccaccccattgccatgtcctgtcctggccagaatgcatgctgttcccccaagcctcgtgggagtgaggccatgggaaacagagatgagcatgtctggacaagtctgtgatggtagtggatgagaataacccatggcaaaacacgcacattcattaagaaatagggcgacagattccccgttggtgaagcactgaaaggtctattactctcataatattgctgttttattttaatccaccagagctaccatgcaaaactttcctcctgtgaaacgctccagataaagctcctctaatctccccttccctcatgtcctccagctcaaacccaccttcatcccccaaaccaatctgtatcatgcctgttatcagagaggcacagaaagatgggcagtgcctccgttgtcaccattccccacacccctacacacccccacaccctcccctccaggctccacgacttcacagtcttactgttgtaaatatcattgtacagtttgtaatcctcaaataatcccattgtcagaggcctcgcctgatgggccttctcaccctcgagaaaggccagggaatctagaaggggcaacccttcaaggagagcttcagggtcatctctgtgtgagacactattgtatattcctgtaagattgcatttttatctaaggaatgatgttatttaaaaaacaaacaaaaaacacaaaaaataagaattgcaaataaatttcttaacaatgtct

SEQ ID NO: 31 - protein, 2138 aa, Homo sapiens
  ref <308>: DATABASE ACCESSION NUMBER: NCBI / NP_001123312.1
  ref <309>: DATABASE ENTRY DATE: 2014-05-14
  ref <313>: RELEVANT RESIDUES IN SEQ ID NO: (1)..(2138)
MVNENTRMYIPEENHQGSNYGSPRPAHANMNANAAAGLAPEHIPTPGAALSWQAAIDAARQAKLMGSAGNATISTVSSTQRKRQQYGKPKKQGSTTATRPPRALLCLTLKNPIRRACISIVEWKPFEIIILLTIFANCVALAIYIPFPEDDSNATNSNLERVEYLFLIIFTVEAFLKVIAYGLLFHPNAYLRNGWNLLDFIIVVVGLFSAILEQATKADGANALGGKGAGFDVKALRAFRVLRPLRLVSGVPSLQVVLNSIIKAMVPLLHIALLVLFVIIIYAIIGLELFMGKMHKTCYNQEGIADVPAEDDPSPCALETGHGRQCQNGTVCKPGWDGPKHGITNFDNFAFAMLTVFQCITMEGWTDVLYWMQDAMGYELPWVYFVSLVIFGSFFVLNLVLGVLSGEFSKEREKAKARGDFQKLREKQQLEEDLKGYLDWITQAEDIDPENEDEGMDEEKPRNMSMPTSETESVNTENVAGGDIEGENCGARLAHRISKSKFSRYWRRWNRFCRRKCRAAVKSNVFYWLVIFLVFLNTLTIASEHYNQPNWLTEVQDTANKALLALFTAEMLLKMYSLGLQAYFVSLFNRFDCFVVCGGILETILVETKIMSPLGISVLRCVRLLRIFKITRYWNSLSNLVASLLNSVRSIASLLLLLFLFIIIFSLLGMQLFGGKFNFDEMQTRRSTFDNFPQSLLTVFQILTGEDWNSVMYDGIMAYGGPSFPGMLVCIYFIILFICGNYILLNVFLAIAVDNLADAESLTSAQKEEEEEKERKKLARTASPEKKQELVEKPAVGESKEEKIELKSITADGESPPATKINMDDLQPNENEDKSPYPNPETTGEEDEEEPEMPVGPRPRPLSELHLKEKAVPMPEASAFFIFSSNNRFRLQCHRIVNDTIFTNLILFFILLSSISLAAEDPVQHTSFRNHILGNADYVFTSIFTLEIILKMTAYGAFLHKGSFCRNYFNILDLLVVSVSLISFGIQSSAINVVKILRVLRVLRPLRAINRAKGLKHVVQCVFVAIRTIGNIVIVTTLLQFMFACIGVQLFKGKLYTCSDSSKQTEAECKGNYITYKDGEVDHPIIQPRSWENSKFDFDNVLAAMMALFTVSTFEGWPELLYRSIDSHTEDKGPIYNYRVEISIFFIIYIIIIAFFMMNIFVGFVIVTFQEQGEQEYKNCELDKNQRQCVEYALKARPLRRYIPKNQHQYKVWYVVNSTYFEYLMFVLILLNTICLAMQHYGQSCLFKIAMNILNMLFTGLFTVEMILKLIAFKPKHYFCDAWNTFDALIVVGSIVDIAITEVNPAEHTQCSPSMNAEENSRISITFFRLFRVMRLVKLLSRGEGIRTLLWTFIKSFQALPYVALLIVMLFFIYAVIGMQVFGKIALNDTTEINRNNNFQTFPQAVLLLFRCATGEAWQDIMLACMPGKKCAPESEPSNSTEGETPCGSSFAVFYFISFYMLCAFLIINLFVAVIMDNFDYLTRDWSILGPHHLDEFKRIWAEYDPEAKGRIKHLDVVTLLRRIQPPLGFGKLCPHRVACKRLVSMNMPLNSDGTVMFNATLFALVRTALRIKTEGNLEQANEELRAIIKKIWKRTSMKLLDQVVPPAGDDEVTVGKFYATFLIQEYFRKFKKRKEQGLVGKPSQRNALSLQAGLRTLHDIGPEIRRAISGDLTAEEELDKAMKEAVSAASEDDIFRRAGGLFGNHVSYYQSDGRSAFPQTFTTQRPLHINKAGSSQGDTESPSHEKLVDSTFTPSSYSSTGSNANINNANNTALGRLPRPAGYPSTVSTVEGHGPPLSPAIRVQEVAWKLSSNRCHSRESQAAMAGQEETSQDETYEVKMNHDTEACSEPSLLSTEMLSYQDDENRQLTLPEEDKRDIRQSPKRGFLRSASLGRRASFHLECLKRQKDRGGDISQKTVLPLHLVHHQALAVAGLSPLLQRSHSPASFPRPFATPPATPGSRGWPPQPVPTLRLEGVESSEKLNSSFPSIHCGSWAETTPGGGGSSAARRVRPVSLMVPSQAGAPGRQFHGSASSLVEAVLISEGLGQFAQDPKFIEVTTQELADACDMTIEEMESAADNILSGGAPQSPNGALLPFVNCRDAGQDRAGGEEDAGCVRARGRPSEEELQDSRVYVSSL

SEQ ID NO: 32 - DNA, 13480 bp, Homo sapiens
  ref <308>: DATABASE ACCESSION NUMBER: NCBI / NM_001129841.1
  ref <309>: DATABASE ENTRY DATE: 2014-05-14
  ref <313>: RELEVANT RESIDUES IN SEQ ID NO: (1)..(13480)
ttattttttcaaatggtgtagccgccggaggtgcggtgctcagttcttggaaggggcccggatgtactgaggatgcgttacagtttcactcgaggaggcagtagtggaaaggagcagtttttggggtttgatgccataatgggaatcaggtaatcgtcggcggggaagaagaaacgctgcagaccacggcttcctcgaatcttgcgcgaaagccgccggcctcggaggagggattaatccagacccgccggggggtgttttcacatttcttcctcttcgtggctgctcctcctattaaaaccatttttggtccatggtcaatgagaatacgaggatgtacattccagaggaaaaccaccaaggttccaactatgggagcccacgccccgcccatgccaacatgaatgccaatgcggcagcggggctggcccctgagcacatccccaccccgggggctgccctgtcgtggcaggcggccatcgacgcagcccggcaggctaagctgatgggcagcgctggcaatgcgaccatctccacagtcagctccacgcagcggaagcggcagcaatatgggaaacccaagaagcagggcagcaccacggccacacgcccgccccgagccctgctctgcctgaccctgaagaaccccatccggagggcctgcatcagcattgtcgaatggaaaccatttgaaataattattttactgactatttttgccaattgtgtggccttagcgatctatattccctttccagaagatgattccaacgccaccaattccaacctggaacgagtggaatatctctttctcataatttttacggtggaagcgtttttaaaagtaatcgcctatggactcctctttcaccccaatgcctacctccgcaacggctggaacctactagattttataattgtggttgtggggctttttagtgcaattttagaacaagcaaccaaagcagatggggcaaacgctctcggagggaaaggggccggatttgatgtgaaggcgctgagggccttccgcgtgctgcgccccctgcggctggtgtccggagtcccaagtctccaggtggtcctgaattccatcatcaaggccatggtccccctgctgcacatcgccctgcttgtgctgtttgtcatcatcatctacgccatcatcggcttggagctcttcatggggaagatgcacaagacctgctacaaccaggagggcatagcagatgttccagcagaagatgacccttccccttgtgcgctggaaacgggccacgggcggcagtgccagaacggcacggtgtgcaagcccggctgggatggtcccaagcacggcatcaccaactttgacaactttgccttcgccatgctcacggtgttccagtgcatcaccatggagggctggacggacgtgctgtactgggtcaatgatgccgtaggaagggactggccctggatctattttgttacactaatcatcatagggtcattttttgtacttaacttggttctcggtgtgcttagcggagagttttccaaagagagggagaaggccaaggcccggggagatttccagaagctgcgggagaagcagcagctagaagaggatctcaaaggctacctggattggatcactcaggccgaagacatcgatcctgagaatgaggacgaaggcatggatgaggagaagccccgaaacatgagcatgcccaccagtgagaccgagtccgtcaacaccgaaaacgtggctggaggtgacatcgagggagaaaactgcggggccaggctggcccaccggatctccaagtcaaagttcagccgctactggcgccggtggaatcggttctgcagaaggaagtgccgcgccgcagtcaagtctaatgtcttctactggctggtgattttcctggtgttcctcaacacgctcaccattgcctctgagcactacaaccagcccaactggctcacagaagtccaagacacggcaaacaaggccctgctggccctgttcacggcagagatgctcctgaagatgtacagcctgggcctgcaggcctacttcgtgtccctcttcaaccgctttgactgcttcgtcgtgtgtggcggcatcctggagaccatcctggtggagaccaagatcatgtccccactgggcatctccgtgctcagatgcgtccggctgctgaggattttcaagatcacgaggtactggaactccttgagcaacctggtggcatccttgctgaactctgtgcgctccatcgcctccctgctccttctcctcttcctcttcatcatcatcttctccctcctggggatgcagctctttggaggaaagttcaactttgatgagatgcagacccggaggagcacattcgataacttcccccagtccctcctcactgtgtttcagatcctgaccggggaggactggaattcggtgatgtatgatgggatcatggcttatggcggcccctcttttccagggatgttagtctgtatttacttcatcatcctcttcatctgtggaaactatatcctactgaatgtgttcttggccattgctgtggacaacctggctgatgctgagagcctcacatctgcccaaaaggaggaggaagaggagaaggagagaaagaagctggccaggactgccagcccagagaagaaacaagagttggtggagaagccggcagtgggggaatccaaggaggagaagattgagctgaaatccatcacggctgacggagagtctccacccgccaccaagatcaacatggatgacctccagcccaatgaaaatgaggataagagcccctaccccaacccagaaactacaggagaagaggatgaggaggagccagagatgcctgtcggccctcgcccacgaccactctctgagcttcaccttaaggaaaaggcagtgcccatgccagaagccagcgcgtttttcatcttcagctctaacaacaggtttcgcctccagtgccaccgcattgtcaatgacacgatcttcaccaacctgatcctcttcttcattctgctcagcagcatttccctggctgctgaggacccggtccagcacacctccttcaggaaccatatcctaggcaatgcagactatgtcttcactagtatctttacattagaaattatccttaagatgactgcttatggggctttcttgcacaagggttctttctgccggaactacttcaacatcctggacctgctggtggtcagcgtgtccctcatctcctttggcatccagtccagtgcaatcaatgtcgtgaagatcttgcgagtcctgcgagtactcaggcccctgagggccatcaacagggccaaggggctaaagcatgtggttcagtgtgtgtttgtcgccatccggaccatcgggaacatcgtgattgtcaccaccctgctgcagttcatgtttgcctgcatcggggtccagctcttcaagggaaagctgtacacctgttcagacagttccaagcagacagaggcggaatgcaagggcaactacatcacgtacaaagacggggaggttgaccaccccatcatccaaccccgcagctgggagaacagcaagtttgactttgacaatgttctggcagccatgatggccctcttcaccgtctccaccttcgaagggtggccagagctgctgtaccgctccatcgactcccacacggaagacaagggccccatctacaactaccgtgtggagatctccatcttcttcatcatctacatcatcatcatcgccttcttcatgatgaacatcttcgtgggcttcgtcatcgtcacctttcaggagcagggggagcaggagtacaagaactgtgagctggacaagaaccagcgacagtgcgtggaatacgccctcaaggcccggcccctgcggaggtacatccccaagaaccagcaccagtacaaagtgtggtacgtggtcaactccacctacttcgagtacctgatgttcgtcctcatcctgctcaacaccatctgcctggccatgcagcactacggccagagctgcctgttcaaaatcgccatgaacatcctcaacatgctcttcactggcctcttcaccgtggagatgatcctgaagctcattgccttcaaacccaagggttactttagtgatccctggaatgtttttgacttcctcatcgtaattggcagcataattgacgtcattctcagtgagactaatccagctgaacatacccaatgctctccctctatgaacgcagaggaaaactcccgcatctccatcaccttcttccgcctgttccgggtcatgcgtctggtgaagctgctgagccgtggggagggcatccggacgctgctgtggaccttcatcaagtccttccaggccctgccctatgtggccctcctgatcgtgatgctgttcttcatctacgcggtgatcgggatgcaggtgtttgggaaaattgccctgaatgataccacagagatcaaccggaacaacaactttcagaccttcccccaggccgtgctgctcctcttcaggtgtgccaccggggaggcctggcaggacatcatgctggcctgcatgccaggcaagaagtgtgccccagagtccgagcccagcaacagcacggagggtgaaacaccctgtggtagcagctttgctgtcttctacttcatcagcttctacatgctctgtgccttcctgatcatcaacctctttgtagctgtcatcatggacaactttgactacctgacaagggactggtccatccttggtccccaccacctggatgagtttaaaagaatctgggcagagtatgaccctgaagccaagggtcgtatcaaacacctggatgtggtgaccctcctccggcggattcagccgccactaggttttgggaagctgtgccctcaccgcgtggcttgcaaacgcctggtctccatgaacatgcctctgaacagcgacgggacagtcatgttcaatgccaccctgtttgccctggtcaggacggccctgaggatcaaaacagaagggaacctagaacaagccaatgaggagctgcgggcgatcatcaagaagatctggaagcggaccagcatgaagctgctggaccaggtggtgccccctgcaggtgatgatgaggtcaccgttggcaagttctacgccacgttcctgatccaggagtacttccggaagttcaagaagcgcaaagagcagggccttgtgggcaagccctcccagaggaacgcgctgtctctgcaggctggcttgcgcacactgcatgacatcgggcctgagatccgacgggccatctctggagatctcaccgctgaggaggagctggacaaggccatgaaggaggctgtgtccgctgcttctgaagatgacatcttcaggagggccggtggcctgttcggcaaccacgtcagctactaccaaagcgacggccggagcgccttcccccagaccttcaccactcagcgcccgctgcacatcaacaaggcgggcagcagccagggcgacactgagtcgccatcccacgagaagctggtggactccaccttcaccccgagcagctactcgtccaccggctccaacgccaacatcaacaacgccaacaacaccgccctgggtcgcctccctcgccccgccggctaccccagcacggtcagcactgtggagggccacgggccccccttgtcccctgccatccgggtgcaggaggtggcgtggaagctcagctccaacaggtgccactcccgggagagccaggcagccatggcgggtcaggaggagacgtctcaggatgagacctatgaagtgaagatgaaccatgacacggaggcctgcagtgagcccagcctgctctccacagagatgctctcctaccaggatgacgaaaatcggcaactgacgctcccagaggaggacaagagggacatccggcaatctccgaagaggggtttcctccgctctgcctcactaggtcgaagggcctccttccacctggaatgtctgaagcgacagaaggaccgagggggagacatctctcagaagacagtcctgcccttgcatctggttcatcatcaggcattggcagtggcaggcctgagccccctcctccagagaagccattcccctgcctcattccctaggccttttgccaccccaccagccacacctggcagccgaggctggcccccacagcccgtccccaccctgcggcttgagggggtcgagtccagtgagaaactcaacagcagcttcccatccatccactgcggctcctgggctgagaccacccccggtggcgggggcagcagcgccgcccggagagtccggcccgtctccctcatggtgcccagccaggctggggccccagggaggcagttccacggcagtgccagcagcctggtggaagcggtcttgatttcagaaggactggggcagtttgctcaagatcccaagttcatcgaggtcaccacccaggagctggccgacgcctgcgacatgaccatagaggagatggagagcgcggccgacaacatcctcagcgggggcgccccacagagccccaatggcgccctcttaccctttgtgaactgcagggacgcggggcaggaccgagccgggggcgaagaggacgcgggctgtgtgcgcgcgcggggtcgaccgagtgaggaggagctccaggacagcagggtctacgtcagcagcctgtagtgggcgctgccagatgcgggcttttttttatttgtttcaatgttcctaatgggttcgtttcagaagtgcctcactgttctcgtgacctggagttaaccggaacagcgtcttcattcatttctgttgggaccagacgcggagcctgggtgcgcgagccgccctccgggaggaaggcgcccggctgcgtctgcagaggcggggagaggaggcggcgagggtcccggggcgcgaggaaggcgcctgccctctcccagctcgcaggccccgggcccggccgcgcctccgcggggagagcaccccggcttcccgcgcgccctcaccaaaaggaccctacagcaaacgggtgtctttcgactctgcttgtagaaaccatttgcacatattctgtacgagcctcgctgtctccctagagccagggccctgcggatttggagaagggagcggggcaggacttccaggaggaccccaacccggcccggagagggaggaggaggcctccaggggcgcggagctctggggatgggcgtcgggccggcagtggtgcggctcactccgtccctgcccacctgcgacgggatcccccgaccggcacgggccacgccgagctcccggccagccgccggcccgcaggcagcgcgagggaggagctgcgccgccggctccgcccaaccaggtggtgctgagcttccgctgagcgctcttttgttttgtggtttgacacttttcttgacagcatgttgcagtttcttttcggttttggttttttttaaatgttttattttgctttcccagcgggaggggaggaagaagagtgtttacaaagtcctgtagccccctcacctttctgttttcacttttgccaatgtacatcgggtttggttttcttgtattatttaaacggttgtggtttcctttttccacggaggttcaatagaagccgctgcaggagagttttaccaaccattgtgtatgcccaataatttgttatcatttccttaggtagtaacctatttttgttctggtttggttcggttatctaatggaaaggtaactggcaatgcacttgatgtggtcttgcacatgtgggtgatagagttgggttcctttttatgctgggtgtacaggtgggtttgggagagaggagcatgcgcgagagagtctccgagtgtgtgcgacgcgtgtgtgtgtggtgggttgtctgtgtgcatatgtcctgcccgtgtatatgcacccacaccatgtgcccgtgcacaccagtgactacgcagtcccccctttctggtttagctgtgggaagatctgaatctggggccgtttgaaagcaaaaacaaaccactgtctctgcttctgaaacgggaatcagtaactctttgcattttctgtcccacaagatatgcaaaaacaatgcaataatattcatttaaaaatacaattgtgagttgtgttggcattaaaactgtattttaaaaaaagacagaaatttaagggaaaaacacaagaaggcattttgcttcaatatattccgtgtaatgttttattgcattgataatgtttctgttgaagaaaccgttatacttgaattcaggtcagtttcagtatttttcaaatatttttttaaaactgaattgcaattgtgccaagcgaatataatgaattgaattaagttggttttcggattcacttcttgtatattttgctgcatgtaaagtaaatcattttgtatttggagtgtgacaagctttacctttgaactcaagtgcttttctatatgtggttgggggaaagggaacaagttttctttagtttgcacaatgagcaaaggtatcaccagtgtagtcattattctgctctccacaaacaggtttggacattactgttttgcatatcttgtgtttgcttacatttccctcaatttttccaaaatcgtttgctgggtatgtttgtaccgcctcttgctgtgagagaccaggacctattttattccagtcttcactctgtccactctgctctggtcatctgatttggtacttctccaagaacagcccttcactgtgaggtgcagggaggcgttctgatgagccctcagtcactgggccgtcatccgcatcccccatggaagaggtagctggctttcccttcccttccaccacacggaattttctctttggcttccttaggaaagtgtacactaaccgggaggataaaattaaagtcaggctgcttggagggaggggcatcctcacttccggattcttgttgctctacccaacaaggacagcaggggctcgagaaaggaactggtgaaaccctgatccatctgaaagtcaactctgcgtgctcctttctccatcccttcctcactctggagcagcctttccttcaggcttgccctaatgtttgggctgccggggagggggccaggacaagggaagaggcatccggagctcacagtgggggtgggaacagatttttgtgggggcatctctaatgctcacttatatctccctagaacatcactcttttggtgctgtgtccttcaaatgtatgtcaacagtggtggctgaaaagggactgctttggggaaaacaggacccaaccattcacccagaattgacccattaaatctcttccagtcctagtgttccctgagcccctcttggcacatatataagtaagctagaaattacaataagggacagtccattcctctatgacagcttgctggactgattcatgacaaagtggagaaatgtactcaatactccccggttaacacagtctagaaacagagtttctttatggatatccacacccaagtcatccaaactttcttgattccttttcactgccatcaaggtcctctagaaattgagtttaggtatcatcctttgaaaagttcccaagatttctaccaggaggtacacacaggcgttccctgtctagggcaggaggactatcctagcttgaccttctgatccactagaataagactggcgtatgatgcctgtcatcagaacagactggcacaagtagtgacatcaatgaaccacagcacaatcttccaagtgatgtctactctccacctaaaatggaattttccccatgaccttgtaaaacataattgtcacatcttccatacccctcctgacagcccccaagtgtcaggagaaaacagtcaggggctaagggcccaagggacttgaagaaacaacagtttaaggtctgcagtttggtcaacttaattcttgtcctccgaccagccctgcctctttcatttccagaccttggagaatttttcccagctttgattcagaaggtactagttataacccctttccttcttcttaatccaataggcctcactctcactgggaaatccactcaaaggaacaaggcaatgtctctcattctatttcccagttccaaattccaggtgcttgtctggagtgaagctacccgttactttctcccagcttttctccacccagcatgtctcctgcccatgcagctgaagacagtggggcaacctcaggagaagcagacctttccatgcccaagttcatctcctgagcaacagtgacacctagaaaatgaggactttggaagtcacccaaaagatggtggctactttatggagtcctgaagatacacagccaccactcctaaaggcaaagaaagaaaacacgaatgtaggtcagggatagagtggaaccctggtcatcggggtttttagcctcatcgtgggaaaggtggtaaaggaggatgatggcatctccatccctagaggccaagaattgaaatatcattgtcaaggattagaaacaattcagcaaagaggccacaaaaagggcctgctgactcccagaagacctctttaaaccccaggggaggcaaatacttgctgatggagtctgggccgtttccatattttaaagaagacctgcctctggggcaaatgtcagcacagagaggactgggaggagaatggaggcaagaaaagggcatattttgactccctctgtgcctcttcccagttcatggaaggatgtgttcagcttacccacccacagtgaccagtgtggtggagccgctgacatctcaaggatctatttgggaaggtgagaagagtactcattccatctgggggtgttgttccagccacatcagcctacctggtgggatgtgggggtgtctgccaccctgtcccccctctgctgatgtccctcccctcaggctgtccaggtgccacctgacacaggctgctgtgcaaagacaggcggggaagcccaaacctcactcccagggaggccctcagccgccagagtccaggttctccagaggctacgatttgaggaggttgagggggaagacaggagggaaagaaaagtcctacaactgtcaggaatggggcacctttccctgtccctaagcaaagctccctcttcccactgccctccccagccccagctccctgtcctccccaacacctagtgagaaagacggtgcgtggaagggagtcccatgggcagatgcttacacgacctctttgtgaagcctcttctgggtttaacttcattcatcaatttattcttatgtcaaagcaatgaaacttttctttctggagccagataccaatacaacaggtgaacgggtttctgccacatctctacattgacgggggatgcttgaacaacccccctcactacacagacacacaccgttaaggcacaagggctggggttgagctctagatgagggactttcctgctcctgcaagggtgagcactgtatacacagacaaggagggtgcagtagagtgactcccttggatggaagtagtaccatcagaacctactattattatgacataaattctatttacatacattgagagaatactacaatcaacactttttcctgggatgactttaagaggtttgagccacagcacctgaagtggcaaagatccatggtctttgtagggtattagagaactcttccagtcacctctgaaagcactctagatcttgcagctgagtggatgaagtgtaacaaatctgttgcacgctgagaggagtcagaattagcatttttcatgaaagttccccacgtctctactaagaatgaggaagaaaagactaagactaggtaattacacagaggcttgaaatgttacatcaccagagccaagtcctctcccttcagatcagttactggctgctacacagggacacccccaccttttcagggcatcccatgcactccacttctcaggatctaaggaatttgactttgtagggatcccagaaagggcactgtgccacttcccctggtgtgaatcagacatacattgtacattcatttctaaaattcactcatgcacctcaaaccaaggtcattatccaaaaaaaaaaaaaaaaagctctgggtggaagagtttgtaagttttaagagagggtcatttctatgtgaggaaatgcagaaatggacagaatgattcttattcactgtttgggtctggagaattcccattgtggaaatcttagagatctcaagtttattaccaagggaataaggaaaaaaaggtgagcaggcaccaggccaagcagtggctcccttgccaaggaacctgaggctgcaggtttcagggacccccttgaagaaacctctcctggccattggccaggagaaaagagaagtctctcctgtagagtcacaagagaagcaaaagagggtgggtcactgggtcctggacatagcccccaaccccaagacttcccaatatggagaaactacaccaatgtttaaaaggggaaaaggaaagaacttgtacatcaagggaagatgatttgtaaacacacagtcctgtgcagaaagatccccttcaggaggtgtctccagcatcccaaagctgtgcgcaccttctcttttcctgcctcaggccacctatgcatccagctgcagcccatacccacacctgaaatccatctcttgaatcccagccaggttatataccaccccattgccatgtcctgtcctggccagaatgcatgctgttcccccaagcctcgtgggagtgaggccatgggaaacagagatgagcatgtctggacaagtctgtgatggtagtggatgagaataacccatggcaaaacacgcacattcattaagaaatagggcgacagattccccgttggtgaagcactgaaaggtctattactctcataatattgctgttttattttaatccaccagagctaccatgcaaaactttcctcctgtgaaacgctccagataaagctcctctaatctccccttccctcatgtcctccagctcaaacccaccttcatcccccaaaccaatctgtatcatgcctgttatcagagaggcacagaaagatgggcagtgcctccgttgtcaccattccccacacccctacacacccccacaccctcccctccaggctccacgacttcacagtcttactgttgtaaatatcattgtacagtttgtaatcctcaaataatcccattgtcagaggcctcgcctgatgggccttctcaccctcgagaaaggccagggaatctagaaggggcaacccttcaaggagagcttcagggtcatctctgtgtgagacactattgtatattcctgtaagattgcatttttatctaaggaatgatgttatttaaaaaacaaacaaaaaacacaaaaaataagaattgcaaataaatttcttaacaatgtct

SEQ ID NO: 33 - protein, 2138 aa, Homo sapiens
  ref <308>: DATABASE ACCESSION NUMBER: NCBI / NP_001123313.1
  ref <309>: DATABASE ENTRY DATE: 2014-05-14
  ref <313>: RELEVANT RESIDUES IN SEQ ID NO: (1)..(2138)
MVNENTRMYIPEENHQGSNYGSPRPAHANMNANAAAGLAPEHIPTPGAALSWQAAIDAARQAKLMGSAGNATISTVSSTQRKRQQYGKPKKQGSTTATRPPRALLCLTLKNPIRRACISIVEWKPFEIIILLTIFANCVALAIYIPFPEDDSNATNSNLERVEYLFLIIFTVEAFLKVIAYGLLFHPNAYLRNGWNLLDFIIVVVGLFSAILEQATKADGANALGGKGAGFDVKALRAFRVLRPLRLVSGVPSLQVVLNSIIKAMVPLLHIALLVLFVIIIYAIIGLELFMGKMHKTCYNQEGIADVPAEDDPSPCALETGHGRQCQNGTVCKPGWDGPKHGITNFDNFAFAMLTVFQCITMEGWTDVLYWVNDAVGRDWPWIYFVTLIIIGSFFVLNLVLGVLSGEFSKEREKAKARGDFQKLREKQQLEEDLKGYLDWITQAEDIDPENEDEGMDEEKPRNMSMPTSETESVNTENVAGGDIEGENCGARLAHRISKSKFSRYWRRWNRFCRRKCRAAVKSNVFYWLVIFLVFLNTLTIASEHYNQPNWLTEVQDTANKALLALFTAEMLLKMYSLGLQAYFVSLFNRFDCFVVCGGILETILVETKIMSPLGISVLRCVRLLRIFKITRYWNSLSNLVASLLNSVRSIASLLLLLFLFIIIFSLLGMQLFGGKFNFDEMQTRRSTFDNFPQSLLTVFQILTGEDWNSVMYDGIMAYGGPSFPGMLVCIYFIILFICGNYILLNVFLAIAVDNLADAESLTSAQKEEEEEKERKKLARTASPEKKQELVEKPAVGESKEEKIELKSITADGESPPATKINMDDLQPNENEDKSPYPNPETTGEEDEEEPEMPVGPRPRPLSELHLKEKAVPMPEASAFFIFSSNNRFRLQCHRIVNDTIFTNLILFFILLSSISLAAEDPVQHTSFRNHILGNADYVFTSIFTLEIILKMTAYGAFLHKGSFCRNYFNILDLLVVSVSLISFGIQSSAINVVKILRVLRVLRPLRAINRAKGLKHVVQCVFVAIRTIGNIVIVTTLLQFMFACIGVQLFKGKLYTCSDSSKQTEAECKGNYITYKDGEVDHPIIQPRSWENSKFDFDNVLAAMMALFTVSTFEGWPELLYRSIDSHTEDKGPIYNYRVEISIFFIIYIIIIAFFMMNIFVGFVIVTFQEQGEQEYKNCELDKNQRQCVEYALKARPLRRYIPKNQHQYKVWYVVNSTYFEYLMFVLILLNTICLAMQHYGQSCLFKIAMNILNMLFTGLFTVEMILKLIAFKPKGYFSDPWNVFDFLIVIGSIIDVILSETNPAEHTQCSPSMNAEENSRISITFFRLFRVMRLVKLLSRGEGIRTLLWTFIKSFQALPYVALLIVMLFFIYAVIGMQVFGKIALNDTTEINRNNNFQTFPQAVLLLFRCATGEAWQDIMLACMPGKKCAPESEPSNSTEGETPCGSSFAVFYFISFYMLCAFLIINLFVAVIMDNFDYLTRDWSILGPHHLDEFKRIWAEYDPEAKGRIKHLDVVTLLRRIQPPLGFGKLCPHRVACKRLVSMNMPLNSDGTVMFNATLFALVRTALRIKTEGNLEQANEELRAIIKKIWKRTSMKLLDQVVPPAGDDEVTVGKFYATFLIQEYFRKFKKRKEQGLVGKPSQRNALSLQAGLRTLHDIGPEIRRAISGDLTAEEELDKAMKEAVSAASEDDIFRRAGGLFGNHVSYYQSDGRSAFPQTFTTQRPLHINKAGSSQGDTESPSHEKLVDSTFTPSSYSSTGSNANINNANNTALGRLPRPAGYPSTVSTVEGHGPPLSPAIRVQEVAWKLSSNRCHSRESQAAMAGQEETSQDETYEVKMNHDTEACSEPSLLSTEMLSYQDDENRQLTLPEEDKRDIRQSPKRGFLRSASLGRRASFHLECLKRQKDRGGDISQKTVLPLHLVHHQALAVAGLSPLLQRSHSPASFPRPFATPPATPGSRGWPPQPVPTLRLEGVESSEKLNSSFPSIHCGSWAETTPGGGGSSAARRVRPVSLMVPSQAGAPGRQFHGSASSLVEAVLISEGLGQFAQDPKFIEVTTQELADACDMTIEEMESAADNILSGGAPQSPNGALLPFVNCRDAGQDRAGGEEDAGCVRARGRPSEEELQDSRVYVSSL

SEQ ID NO: 34 - DNA, 13480 bp, Homo sapiens
  ref <308>: DATABASE ACCESSION NUMBER: NCBI / NM_001129842.1
  ref <309>: DATABASE ENTRY DATE: 2014-05-14
  ref <313>: RELEVANT RESIDUES IN SEQ ID NO: (1)..(13480)
ttattttttcaaatggtgtagccgccggaggtgcggtgctcagttcttggaaggggcccggatgtactgaggatgcgttacagtttcactcgaggaggcagtagtggaaaggagcagtttttggggtttgatgccataatgggaatcaggtaatcgtcggcggggaagaagaaacgctgcagaccacggcttcctcgaatcttgcgcgaaagccgccggcctcggaggagggattaatccagacccgccggggggtgttttcacatttcttcctcttcgtggctgctcctcctattaaaaccatttttggtccatggtcaatgagaatacgaggatgtacattccagaggaaaaccaccaaggttccaactatgggagcccacgccccgcccatgccaacatgaatgccaatgcggcagcggggctggcccctgagcacatccccaccccgggggctgccctgtcgtggcaggcggccatcgacgcagcccggcaggctaagctgatgggcagcgctggcaatgcgaccatctccacagtcagctccacgcagcggaagcggcagcaatatgggaaacccaagaagcagggcagcaccacggccacacgcccgccccgagccctgctctgcctgaccctgaagaaccccatccggagggcctgcatcagcattgtcgaatggaaaccatttgaaataattattttactgactatttttgccaattgtgtggccttagcgatctatattccctttccagaagatgattccaacgccaccaattccaacctggaacgagtggaatatctctttctcataatttttacggtggaagcgtttttaaaagtaatcgcctatggactcctctttcaccccaatgcctacctccgcaacggctggaacctactagattttataattgtggttgtggggctttttagtgcaattttagaacaagcaaccaaagcagatggggcaaacgctctcggagggaaaggggccggatttgatgtgaaggcgctgagggccttccgcgtgctgcgccccctgcggctggtgtccggagtcccaagtctccaggtggtcctgaattccatcatcaaggccatggtccccctgctgcacatcgccctgcttgtgctgtttgtcatcatcatctacgccatcatcggcttggagctcttcatggggaagatgcacaagacctgctacaaccaggagggcatagcagatgttccagcagaagatgacccttccccttgtgcgctggaaacgggccacgggcggcagtgccagaacggcacggtgtgcaagcccggctgggatggtcccaagcacggcatcaccaactttgacaactttgccttcgccatgctcacggtgttccagtgcatcaccatggagggctggacggacgtgctgtactgggtcaatgatgccgtaggaagggactggccctggatctattttgttacactaatcatcatagggtcattttttgtacttaacttggttctcggtgtgcttagcggagagttttccaaagagagggagaaggccaaggcccggggagatttccagaagctgcgggagaagcagcagctagaagaggatctcaaaggctacctggattggatcactcaggccgaagacatcgatcctgagaatgaggacgaaggcatggatgaggagaagccccgaaacatgagcatgcccaccagtgagaccgagtccgtcaacaccgaaaacgtggctggaggtgacatcgagggagaaaactgcggggccaggctggcccaccggatctccaagtcaaagttcagccgctactggcgccggtggaatcggttctgcagaaggaagtgccgcgccgcagtcaagtctaatgtcttctactggctggtgattttcctggtgttcctcaacacgctcaccattgcctctgagcactacaaccagcccaactggctcacagaagtccaagacacggcaaacaaggccctgctggccctgttcacggcagagatgctcctgaagatgtacagcctgggcctgcaggcctacttcgtgtccctcttcaaccgctttgactgcttcgtcgtgtgtggcggcatcctggagaccatcctggtggagaccaagatcatgtccccactgggcatctccgtgctcagatgcgtccggctgctgaggattttcaagatcacgaggtactggaactccttgagcaacctggtggcatccttgctgaactctgtgcgctccatcgcctccctgctccttctcctcttcctcttcatcatcatcttctccctcctggggatgcagctctttggaggaaagttcaactttgatgagatgcagacccggaggagcacattcgataacttcccccagtccctcctcactgtgtttcagatcctgaccggggaggactggaattcggtgatgtatgatgggatcatggcttatggcggcccctcttttccagggatgttagtctgtatttacttcatcatcctcttcatctgtggaaactatatcctactgaatgtgttcttggccattgctgtggacaacctggctgatgctgagagcctcacatctgcccaaaaggaggaggaagaggagaaggagagaaagaagctggccaggactgccagcccagagaagaaacaagagttggtggagaagccggcagtgggggaatccaaggaggagaagattgagctgaaatccatcacggctgacggagagtctccacccgccaccaagatcaacatggatgacctccagcccaatgaaaatgaggataagagcccctaccccaacccagaaactacaggagaagaggatgaggaggagccagagatgcctgtcggccctcgcccacgaccactctctgagcttcaccttaaggaaaaggcagtgcccatgccagaagccagcgcgtttttcatcttcagctctaacaacaggtttcgcctccagtgccaccgcattgtcaatgacacgatcttcaccaacctgatcctcttcttcattctgctcagcagcatttccctggctgctgaggacccggtccagcacacctccttcaggaaccatattctgttttattttgatattgtttttaccaccattttcaccattgaaattgctctgaagatgactgcttatggggctttcttgcacaagggttctttctgccggaactacttcaacatcctggacctgctggtggtcagcgtgtccctcatctcctttggcatccagtccagtgcaatcaatgtcgtgaagatcttgcgagtcctgcgagtactcaggcccctgagggccatcaacagggccaaggggctaaagcatgtggttcagtgtgtgtttgtcgccatccggaccatcgggaacatcgtgattgtcaccaccctgctgcagttcatgtttgcctgcatcggggtccagctcttcaagggaaagctgtacacctgttcagacagttccaagcagacagaggcggaatgcaagggcaactacatcacgtacaaagacggggaggttgaccaccccatcatccaaccccgcagctgggagaacagcaagtttgactttgacaatgttctggcagccatgatggccctcttcaccgtctccaccttcgaagggtggccagagctgctgtaccgctccatcgactcccacacggaagacaagggccccatctacaactaccgtgtggagatctccatcttcttcatcatctacatcatcatcatcgccttcttcatgatgaacatcttcgtgggcttcgtcatcgtcacctttcaggagcagggggagcaggagtacaagaactgtgagctggacaagaaccagcgacagtgcgtggaatacgccctcaaggcccggcccctgcggaggtacatccccaagaaccagcaccagtacaaagtgtggtacgtggtcaactccacctacttcgagtacctgatgttcgtcctcatcctgctcaacaccatctgcctggccatgcagcactacggccagagctgcctgttcaaaatcgccatgaacatcctcaacatgctcttcactggcctcttcaccgtggagatgatcctgaagctcattgccttcaaacccaagggttactttagtgatccctggaatgtttttgacttcctcatcgtaattggcagcataattgacgtcattctcagtgagactaatccagctgaacatacccaatgctctccctctatgaacgcagaggaaaactcccgcatctccatcaccttcttccgcctgttccgggtcatgcgtctggtgaagctgctgagccgtggggagggcatccggacgctgctgtggaccttcatcaagtccttccaggccctgccctatgtggccctcctgatcgtgatgctgttcttcatctacgcggtgatcgggatgcaggtgtttgggaaaattgccctgaatgataccacagagatcaaccggaacaacaactttcagaccttcccccaggccgtgctgctcctcttcaggtgtgccaccggggaggcctggcaggacatcatgctggcctgcatgccaggcaagaagtgtgccccagagtccgagcccagcaacagcacggagggtgaaacaccctgtggtagcagctttgctgtcttctacttcatcagcttctacatgctctgtgccttcctgatcatcaacctctttgtagctgtcatcatggacaactttgactacctgacaagggactggtccatccttggtccccaccacctggatgagtttaaaagaatctgggcagagtatgaccctgaagccaagggtcgtatcaaacacctggatgtggtgaccctcctccggcggattcagccgccactaggttttgggaagctgtgccctcaccgcgtggcttgcaaacgcctggtctccatgaacatgcctctgaacagcgacgggacagtcatgttcaatgccaccctgtttgccctggtcaggacggccctgaggatcaaaacagaagggaacctagaacaagccaatgaggagctgcgggcgatcatcaagaagatctggaagcggaccagcatgaagctgctggaccaggtggtgccccctgcaggtgatgatgaggtcaccgttggcaagttctacgccacgttcctgatccaggagtacttccggaagttcaagaagcgcaaagagcagggccttgtgggcaagccctcccagaggaacgcgctgtctctgcaggctggcttgcgcacactgcatgacatcgggcctgagatccgacgggccatctctggagatctcaccgctgaggaggagctggacaaggccatgaaggaggctgtgtccgctgcttctgaagatgacatcttcaggagggccggtggcctgttcggcaaccacgtcagctactaccaaagcgacggccggagcgccttcccccagaccttcaccactcagcgcccgctgcacatcaacaaggcgggcagcagccagggcgacactgagtcgccatcccacgagaagctggtggactccaccttcaccccgagcagctactcgtccaccggctccaacgccaacatcaacaacgccaacaacaccgccctgggtcgcctccctcgccccgccggctaccccagcacggtcagcactgtggagggccacgggccccccttgtcccctgccatccgggtgcaggaggtggcgtggaagctcagctccaacaggtgccactcccgggagagccaggcagccatggcgggtcaggaggagacgtctcaggatgagacctatgaagtgaagatgaaccatgacacggaggcctgcagtgagcccagcctgctctccacagagatgctctcctaccaggatgacgaaaatcggcaactgacgctcccagaggaggacaagagggacatccggcaatctccgaagaggggtttcctccgctctgcctcactaggtcgaagggcctccttccacctggaatgtctgaagcgacagaaggaccgagggggagacatctctcagaagacagtcctgcccttgcatctggttcatcatcaggcattggcagtggcaggcctgagccccctcctccagagaagccattcccctgcctcattccctaggccttttgccaccccaccagccacacctggcagccgaggctggcccccacagcccgtccccaccctgcggcttgagggggtcgagtccagtgagaaactcaacagcagcttcccatccatccactgcggctcctgggctgagaccacccccggtggcgggggcagcagcgccgcccggagagtccggcccgtctccctcatggtgcccagccaggctggggccccagggaggcagttccacggcagtgccagcagcctggtggaagcggtcttgatttcagaaggactggggcagtttgctcaagatcccaagttcatcgaggtcaccacccaggagctggccgacgcctgcgacatgaccatagaggagatggagagcgcggccgacaacatcctcagcgggggcgccccacagagccccaatggcgccctcttaccctttgtgaactgcagggacgcggggcaggaccgagccgggggcgaagaggacgcgggctgtgtgcgcgcgcggggtcgaccgagtgaggaggagctccaggacagcagggtctacgtcagcagcctgtagtgggcgctgccagatgcgggcttttttttatttgtttcaatgttcctaatgggttcgtttcagaagtgcctcactgttctcgtgacctggagttaaccggaacagcgtcttcattcatttctgttgggaccagacgcggagcctgggtgcgcgagccgccctccgggaggaaggcgcccggctgcgtctgcagaggcggggagaggaggcggcgagggtcccggggcgcgaggaaggcgcctgccctctcccagctcgcaggccccgggcccggccgcgcctccgcggggagagcaccccggcttcccgcgcgccctcaccaaaaggaccctacagcaaacgggtgtctttcgactctgcttgtagaaaccatttgcacatattctgtacgagcctcgctgtctccctagagccagggccctgcggatttggagaagggagcggggcaggacttccaggaggaccccaacccggcccggagagggaggaggaggcctccaggggcgcggagctctggggatgggcgtcgggccggcagtggtgcggctcactccgtccctgcccacctgcgacgggatcccccgaccggcacgggccacgccgagctcccggccagccgccggcccgcaggcagcgcgagggaggagctgcgccgccggctccgcccaaccaggtggtgctgagcttccgctgagcgctcttttgttttgtggtttgacacttttcttgacagcatgttgcagtttcttttcggttttggttttttttaaatgttttattttgctttcccagcgggaggggaggaagaagagtgtttacaaagtcctgtagccccctcacctttctgttttcacttttgccaatgtacatcgggtttggttttcttgtattatttaaacggttgtggtttcctttttccacggaggttcaatagaagccgctgcaggagagttttaccaaccattgtgtatgcccaataatttgttatcatttccttaggtagtaacctatttttgttctggtttggttcggttatctaatggaaaggtaactggcaatgcacttgatgtggtcttgcacatgtgggtgatagagttgggttcctttttatgctgggtgtacaggtgggtttgggagagaggagcatgcgcgagagagtctccgagtgtgtgcgacgcgtgtgtgtgtggtgggttgtctgtgtgcatatgtcctgcccgtgtatatgcacccacaccatgtgcccgtgcacaccagtgactacgcagtcccccctttctggtttagctgtgggaagatctgaatctggggccgtttgaaagcaaaaacaaaccactgtctctgcttctgaaacgggaatcagtaactctttgcattttctgtcccacaagatatgcaaaaacaatgcaataatattcatttaaaaatacaattgtgagttgtgttggcattaaaactgtattttaaaaaaagacagaaatttaagggaaaaacacaagaaggcattttgcttcaatatattccgtgtaatgttttattgcattgataatgtttctgttgaagaaaccgttatacttgaattcaggtcagtttcagtatttttcaaatatttttttaaaactgaattgcaattgtgccaagcgaatataatgaattgaattaagttggttttcggattcacttcttgtatattttgctgcatgtaaagtaaatcattttgtatttggagtgtgacaagctttacctttgaactcaagtgcttttctatatgtggttgggggaaagggaacaagttttctttagtttgcacaatgagcaaaggtatcaccagtgtagtcattattctgctctccacaaacaggtttggacattactgttttgcatatcttgtgtttgcttacatttccctcaatttttccaaaatcgtttgctgggtatgtttgtaccgcctcttgctgtgagagaccaggacctattttattccagtcttcactctgtccactctgctctggtcatctgatttggtacttctccaagaacagcccttcactgtgaggtgcagggaggcgttctgatgagccctcagtcactgggccgtcatccgcatcccccatggaagaggtagctggctttcccttcccttccaccacacggaattttctctttggcttccttaggaaagtgtacactaaccgggaggataaaattaaagtcaggctgcttggagggaggggcatcctcacttccggattcttgttgctctacccaacaaggacagcaggggctcgagaaaggaactggtgaaaccctgatccatctgaaagtcaactctgcgtgctcctttctccatcccttcctcactctggagcagcctttccttcaggcttgccctaatgtttgggctgccggggagggggccaggacaagggaagaggcatccggagctcacagtgggggtgggaacagatttttgtgggggcatctctaatgctcacttatatctccctagaacatcactcttttggtgctgtgtccttcaaatgtatgtcaacagtggtggctgaaaagggactgctttggggaaaacaggacccaaccattcacccagaattgacccattaaatctcttccagtcctagtgttccctgagcccctcttggcacatatataagtaagctagaaattacaataagggacagtccattcctctatgacagcttgctggactgattcatgacaaagtggagaaatgtactcaatactccccggttaacacagtctagaaacagagtttctttatggatatccacacccaagtcatccaaactttcttgattccttttcactgccatcaaggtcctctagaaattgagtttaggtatcatcctttgaaaagttcccaagatttctaccaggaggtacacacaggcgttccctgtctagggcaggaggactatcctagcttgaccttctgatccactagaataagactggcgtatgatgcctgtcatcagaacagactggcacaagtagtgacatcaatgaaccacagcacaatcttccaagtgatgtctactctccacctaaaatggaattttccccatgaccttgtaaaacataattgtcacatcttccatacccctcctgacagcccccaagtgtcaggagaaaacagtcaggggctaagggcccaagggacttgaagaaacaacagtttaaggtctgcagtttggtcaacttaattcttgtcctccgaccagccctgcctctttcatttccagaccttggagaatttttcccagctttgattcagaaggtactagttataacccctttccttcttcttaatccaataggcctcactctcactgggaaatccactcaaaggaacaaggcaatgtctctcattctatttcccagttccaaattccaggtgcttgtctggagtgaagctacccgttactttctcccagcttttctccacccagcatgtctcctgcccatgcagctgaagacagtggggcaacctcaggagaagcagacctttccatgcccaagttcatctcctgagcaacagtgacacctagaaaatgaggactttggaagtcacccaaaagatggtggctactttatggagtcctgaagatacacagccaccactcctaaaggcaaagaaagaaaacacgaatgtaggtcagggatagagtggaaccctggtcatcggggtttttagcctcatcgtgggaaaggtggtaaaggaggatgatggcatctccatccctagaggccaagaattgaaatatcattgtcaaggattagaaacaattcagcaaagaggccacaaaaagggcctgctgactcccagaagacctctttaaaccccaggggaggcaaatacttgctgatggagtctgggccgtttccatattttaaagaagacctgcctctggggcaaatgtcagcacagagaggactgggaggagaatggaggcaagaaaagggcatattttgactccctctgtgcctcttcccagttcatggaaggatgtgttcagcttacccacccacagtgaccagtgtggtggagccgctgacatctcaaggatctatttgggaaggtgagaagagtactcattccatctgggggtgttgttccagccacatcagcctacctggtgggatgtgggggtgtctgccaccctgtcccccctctgctgatgtccctcccctcaggctgtccaggtgccacctgacacaggctgctgtgcaaagacaggcggggaagcccaaacctcactcccagggaggccctcagccgccagagtccaggttctccagaggctacgatttgaggaggttgagggggaagacaggagggaaagaaaagtcctacaactgtcaggaatggggcacctttccctgtccctaagcaaagctccctcttcccactgccctccccagccccagctccctgtcctccccaacacctagtgagaaagacggtgcgtggaagggagtcccatgggcagatgcttacacgacctctttgtgaagcctcttctgggtttaacttcattcatcaatttattcttatgtcaaagcaatgaaacttttctttctggagccagataccaatacaacaggtgaacgggtttctgccacatctctacattgacgggggatgcttgaacaacccccctcactacacagacacacaccgttaaggcacaagggctggggttgagctctagatgagggactttcctgctcctgcaagggtgagcactgtatacacagacaaggagggtgcagtagagtgactcccttggatggaagtagtaccatcagaacctactattattatgacataaattctatttacatacattgagagaatactacaatcaacactttttcctgggatgactttaagaggtttgagccacagcacctgaagtggcaaagatccatggtctttgtagggtattagagaactcttccagtcacctctgaaagcactctagatcttgcagctgagtggatgaagtgtaacaaatctgttgcacgctgagaggagtcagaattagcatttttcatgaaagttccccacgtctctactaagaatgaggaagaaaagactaagactaggtaattacacagaggcttgaaatgttacatcaccagagccaagtcctctcccttcagatcagttactggctgctacacagggacacccccaccttttcagggcatcccatgcactccacttctcaggatctaaggaatttgactttgtagggatcccagaaagggcactgtgccacttcccctggtgtgaatcagacatacattgtacattcatttctaaaattcactcatgcacctcaaaccaaggtcattatccaaaaaaaaaaaaaaaaagctctgggtggaagagtttgtaagttttaagagagggtcatttctatgtgaggaaatgcagaaatggacagaatgattcttattcactgtttgggtctggagaattcccattgtggaaatcttagagatctcaagtttattaccaagggaataaggaaaaaaaggtgagcaggcaccaggccaagcagtggctcccttgccaaggaacctgaggctgcaggtttcagggacccccttgaagaaacctctcctggccattggccaggagaaaagagaagtctctcctgtagagtcacaagagaagcaaaagagggtgggtcactgggtcctggacatagcccccaaccccaagacttcccaatatggagaaactacaccaatgtttaaaaggggaaaaggaaagaacttgtacatcaagggaagatgatttgtaaacacacagtcctgtgcagaaagatccccttcaggaggtgtctccagcatcccaaagctgtgcgcaccttctcttttcctgcctcaggccacctatgcatccagctgcagcccatacccacacctgaaatccatctcttgaatcccagccaggttatataccaccccattgccatgtcctgtcctggccagaatgcatgctgttcccccaagcctcgtgggagtgaggccatgggaaacagagatgagcatgtctggacaagtctgtgatggtagtggatgagaataacccatggcaaaacacgcacattcattaagaaatagggcgacagattccccgttggtgaagcactgaaaggtctattactctcataatattgctgttttattttaatccaccagagctaccatgcaaaactttcctcctgtgaaacgctccagataaagctcctctaatctccccttccctcatgtcctccagctcaaacccaccttcatcccccaaaccaatctgtatcatgcctgttatcagagaggcacagaaagatgggcagtgcctccgttgtcaccattccccacacccctacacacccccacaccctcccctccaggctccacgacttcacagtcttactgttgtaaatatcattgtacagtttgtaatcctcaaataatcccattgtcagaggcctcgcctgatgggccttctcaccctcgagaaaggccagggaatctagaaggggcaacccttcaaggagagcttcagggtcatctctgtgtgagacactattgtatattcctgtaagattgcatttttatctaaggaatgatgttatttaaaaaacaaacaaaaaacacaaaaaataagaattgcaaataaatttcttaacaatgtct

SEQ ID NO: 35 - protein, 2138 aa, Homo sapiens
  ref <308>: DATABASE ACCESSION NUMBER: NCBI / NM_001129842.1
  ref <309>: DATABASE ENTRY DATE: 2014-05-14
  ref <313>: RELEVANT RESIDUES IN SEQ ID NO: (1)..(2138)
MVNENTRMYIPEENHQGSNYGSPRPAHANMNANAAAGLAPEHIPTPGAALSWQAAIDAARQAKLMGSAGNATISTVSSTQRKRQQYGKPKKQGSTTATRPPRALLCLTLKNPIRRACISIVEWKPFEIIILLTIFANCVALAIYIPFPEDDSNATNSNLERVEYLFLIIFTVEAFLKVIAYGLLFHPNAYLRNGWNLLDFIIVVVGLFSAILEQATKADGANALGGKGAGFDVKALRAFRVLRPLRLVSGVPSLQVVLNSIIKAMVPLLHIALLVLFVIIIYAIIGLELFMGKMHKTCYNQEGIADVPAEDDPSPCALETGHGRQCQNGTVCKPGWDGPKHGITNFDNFAFAMLTVFQCITMEGWTDVLYWVNDAVGRDWPWIYFVTLIIIGSFFVLNLVLGVLSGEFSKEREKAKARGDFQKLREKQQLEEDLKGYLDWITQAEDIDPENEDEGMDEEKPRNMSMPTSETESVNTENVAGGDIEGENCGARLAHRISKSKFSRYWRRWNRFCRRKCRAAVKSNVFYWLVIFLVFLNTLTIASEHYNQPNWLTEVQDTANKALLALFTAEMLLKMYSLGLQAYFVSLFNRFDCFVVCGGILETILVETKIMSPLGISVLRCVRLLRIFKITRYWNSLSNLVASLLNSVRSIASLLLLLFLFIIIFSLLGMQLFGGKFNFDEMQTRRSTFDNFPQSLLTVFQILTGEDWNSVMYDGIMAYGGPSFPGMLVCIYFIILFICGNYILLNVFLAIAVDNLADAESLTSAQKEEEEEKERKKLARTASPEKKQELVEKPAVGESKEEKIELKSITADGESPPATKINMDDLQPNENEDKSPYPNPETTGEEDEEEPEMPVGPRPRPLSELHLKEKAVPMPEASAFFIFSSNNRFRLQCHRIVNDTIFTNLILFFILLSSISLAAEDPVQHTSFRNHILFYFDIVFTTIFTIEIALKMTAYGAFLHKGSFCRNYFNILDLLVVSVSLISFGIQSSAINVVKILRVLRVLRPLRAINRAKGLKHVVQCVFVAIRTIGNIVIVTTLLQFMFACIGVQLFKGKLYTCSDSSKQTEAECKGNYITYKDGEVDHPIIQPRSWENSKFDFDNVLAAMMALFTVSTFEGWPELLYRSIDSHTEDKGPIYNYRVEISIFFIIYIIIIAFFMMNIFVGFVIVTFQEQGEQEYKNCELDKNQRQCVEYALKARPLRRYIPKNQHQYKVWYVVNSTYFEYLMFVLILLNTICLAMQHYGQSCLFKIAMNILNMLFTGLFTVEMILKLIAFKPKGYFSDPWNVFDFLIVIGSIIDVILSETNPAEHTQCSPSMNAEENSRISITFFRLFRVMRLVKLLSRGEGIRTLLWTFIKSFQALPYVALLIVMLFFIYAVIGMQVFGKIALNDTTEINRNNNFQTFPQAVLLLFRCATGEAWQDIMLACMPGKKCAPESEPSNSTEGETPCGSSFAVFYFISFYMLCAFLIINLFVAVIMDNFDYLTRDWSILGPHHLDEFKRIWAEYDPEAKGRIKHLDVVTLLRRIQPPLGFGKLCPHRVACKRLVSMNMPLNSDGTVMFNATLFALVRTALRIKTEGNLEQANEELRAIIKKIWKRTSMKLLDQVVPPAGDDEVTVGKFYATFLIQEYFRKFKKRKEQGLVGKPSQRNALSLQAGLRTLHDIGPEIRRAISGDLTAEEELDKAMKEAVSAASEDDIFRRAGGLFGNHVSYYQSDGRSAFPQTFTTQRPLHINKAGSSQGDTESPSHEKLVDSTFTPSSYSSTGSNANINNANNTALGRLPRPAGYPSTVSTVEGHGPPLSPAIRVQEVAWKLSSNRCHSRESQAAMAGQEETSQDETYEVKMNHDTEACSEPSLLSTEMLSYQDDENRQLTLPEEDKRDIRQSPKRGFLRSASLGRRASFHLECLKRQKDRGGDISQKTVLPLHLVHHQALAVAGLSPLLQRSHSPASFPRPFATPPATPGSRGWPPQPVPTLRLEGVESSEKLNSSFPSIHCGSWAETTPGGGGSSAARRVRPVSLMVPSQAGAPGRQFHGSASSLVEAVLISEGLGQFAQDPKFIEVTTQELADACDMTIEEMESAADNILSGGAPQSPNGALLPFVNCRDAGQDRAGGEEDAGCVRARGRPSEEELQDSRVYVSSL

SEQ ID NO: 36 - DNA, 13480 bp, Homo sapiens
  ref <308>: DATABASE ACCESSION NUMBER: NCBI / NM_001129843.1
  ref <309>: DATABASE ENTRY DATE: 2014-05-14
  ref <313>: RELEVANT RESIDUES IN SEQ ID NO: (1)..(13480)
ttattttttcaaatggtgtagccgccggaggtgcggtgctcagttcttggaaggggcccggatgtactgaggatgcgttacagtttcactcgaggaggcagtagtggaaaggagcagtttttggggtttgatgccataatgggaatcaggtaatcgtcggcggggaagaagaaacgctgcagaccacggcttcctcgaatcttgcgcgaaagccgccggcctcggaggagggattaatccagacccgccggggggtgttttcacatttcttcctcttcgtggctgctcctcctattaaaaccatttttggtccatggtcaatgagaatacgaggatgtacattccagaggaaaaccaccaaggttccaactatgggagcccacgccccgcccatgccaacatgaatgccaatgcggcagcggggctggcccctgagcacatccccaccccgggggctgccctgtcgtggcaggcggccatcgacgcagcccggcaggctaagctgatgggcagcgctggcaatgcgaccatctccacagtcagctccacgcagcggaagcggcagcaatatgggaaacccaagaagcagggcagcaccacggccacacgcccgccccgagccctgctctgcctgaccctgaagaaccccatccggagggcctgcatcagcattgtcgaatggaaaccatttgaaataattattttactgactatttttgccaattgtgtggccttagcgatctatattccctttccagaagatgattccaacgccaccaattccaacctggaacgagtggaatatctctttctcataatttttacggtggaagcgtttttaaaagtaatcgcctatggactcctctttcaccccaatgcctacctccgcaacggctggaacctactagattttataattgtggttgtggggctttttagtgcaattttagaacaagcaaccaaagcagatggggcaaacgctctcggagggaaaggggccggatttgatgtgaaggcgctgagggccttccgcgtgctgcgccccctgcggctggtgtccggagtcccaagtctccaggtggtcctgaattccatcatcaaggccatggtccccctgctgcacatcgccctgcttgtgctgtttgtcatcatcatctacgccatcatcggcttggagctcttcatggggaagatgcacaagacctgctacaaccaggagggcatagcagatgttccagcagaagatgacccttccccttgtgcgctggaaacgggccacgggcggcagtgccagaacggcacggtgtgcaagcccggctgggatggtcccaagcacggcatcaccaactttgacaactttgccttcgccatgctcacggtgttccagtgcatcaccatggagggctggacggacgtgctgtactgggtcaatgatgccgtaggaagggactggccctggatctattttgttacactaatcatcatagggtcattttttgtacttaacttggttctcggtgtgcttagcggagagttttccaaagagagggagaaggccaaggcccggggagatttccagaagctgcgggagaagcagcagctagaagaggatctcaaaggctacctggattggatcactcaggccgaagacatcgatcctgagaatgaggacgaaggcatggatgaggagaagccccgaaacatgagcatgcccaccagtgagaccgagtccgtcaacaccgaaaacgtggctggaggtgacatcgagggagaaaactgcggggccaggctggcccaccggatctccaagtcaaagttcagccgctactggcgccggtggaatcggttctgcagaaggaagtgccgcgccgcagtcaagtctaatgtcttctactggctggtgattttcctggtgttcctcaacacgctcaccattgcctctgagcactacaaccagcccaactggctcacagaagtccaagacacggcaaacaaggccctgctggccctgttcacggcagagatgctcctgaagatgtacagcctgggcctgcaggcctacttcgtgtccctcttcaaccgctttgactgcttcgtcgtgtgtggcggcatcctggagaccatcctggtggagaccaagatcatgtccccactgggcatctccgtgctcagatgcgtccggctgctgaggattttcaagatcacgaggtactggaactccttgagcaacctggtggcatccttgctgaactctgtgcgctccatcgcctccctgctccttctcctcttcctcttcatcatcatcttctccctcctggggatgcagctctttggaggaaagttcaactttgatgagatgcagacccggaggagcacattcgataacttcccccagtccctcctcactgtgtttcagatcctgaccggggaggactggaattcggtgatgtatgatgggatcatggcttatggcggcccctcttttccagggatgttagtctgtatttacttcatcatcctcttcatctgtggaaactatatcctactgaatgtgttcttggccattgctgtggacaacctggctgatgctgagagcctcacatctgcccaaaaggaggaggaagaggagaaggagagaaagaagctggccaggactgccagcccagagaagaaacaagagttggtggagaagccggcagtgggggaatccaaggaggagaagattgagctgaaatccatcacggctgacggagagtctccacccgccaccaagatcaacatggatgacctccagcccaatgaaaatgaggataagagcccctaccccaacccagaaactacaggagaagaggatgaggaggagccagagatgcctgtcggccctcgcccacgaccactctctgagcttcaccttaaggaaaaggcagtgcccatgccagaagccagcgcgtttttcatcttcagctctaacaacaggtttcgcctccagtgccaccgcattgtcaatgacacgatcttcaccaacctgatcctcttcttcattctgctcagcagcatttccctggctgctgaggacccggtccagcacacctccttcaggaaccatatcctaggcaatgcagactatgtcttcactagtatctttacattagaaattatccttaagatgactgcttatggggctttcttgcacaagggttctttctgccggaactacttcaacatcctggacctgctggtggtcagcgtgtccctcatctcctttggcatccagtccagtgcaatcaatgtcgtgaagatcttgcgagtcctgcgagtactcaggcccctgagggccatcaacagggccaaggggctaaagcatgtggttcagtgtgtgtttgtcgccatccggaccatcgggaacatcgtgattgtcaccaccctgctgcagttcatgtttgcctgcatcggggtccagctcttcaagggaaagctgtacacctgttcagacagttccaagcagacagaggcggaatgcaagggcaactacatcacgtacaaagacggggaggttgaccaccccatcatccaaccccgcagctgggagaacagcaagtttgactttgacaatgttctggcagccatgatggccctcttcaccgtctccaccttcgaagggtggccagagctgctgtaccgctccatcgactcccacacggaagacaagggccccatctacaactaccgtgtggagatctccatcttcttcatcatctacatcatcatcatcgccttcttcatgatgaacatcttcgtgggcttcgtcatcgtcacctttcaggagcagggggagcaggagtacaagaactgtgagctggacaagaaccagcgacagtgcgtggaatacgccctcaaggcccggcccctgcggaggtacatccccaagaaccagcaccagtacaaagtgtggtacgtggtcaactccacctacttcgagtacctgatgttcgtcctcatcctgctcaacaccatctgcctggccatgcagcactacggccagagctgcctgttcaaaatcgccatgaacatcctcaacatgctcttcactggcctcttcaccgtggagatgatcctgaagctcattgccttcaaacccaagcactatttctgtgatgcatggaatacatttgacgccttgattgttgtgggtagcattgttgatatagcaatcaccgaggtaaacccagctgaacatacccaatgctctccctctatgaacgcagaggaaaactcccgcatctccatcaccttcttccgcctgttccgggtcatgcgtctggtgaagctgctgagccgtggggagggcatccggacgctgctgtggaccttcatcaagtccttccaggccctgccctatgtggccctcctgatcgtgatgctgttcttcatctacgcggtgatcgggatgcaggtgtttgggaaaattgccctgaatgataccacagagatcaaccggaacaacaactttcagaccttcccccaggccgtgctgctcctcttcaggtgtgccaccggggaggcctggcaggacatcatgctggcctgcatgccaggcaagaagtgtgccccagagtccgagcccagcaacagcacggagggtgaaacaccctgtggtagcagctttgctgtcttctacttcatcagcttctacatgctctgtgccttcctgatcatcaacctctttgtagctgtcatcatggacaactttgactacctgacaagggactggtccatccttggtccccaccacctggatgagtttaaaagaatctgggcagagtatgaccctgaagccaagggtcgtatcaaacacctggatgtggtgaccctcctccggcggattcagccgccactaggttttgggaagctgtgccctcaccgcgtggcttgcaaacgcctggtctccatgaacatgcctctgaacagcgacgggacagtcatgttcaatgccaccctgtttgccctggtcaggacggccctgaggatcaaaacagaagggaacctagaacaagccaatgaggagctgcgggcgatcatcaagaagatctggaagcggaccagcatgaagctgctggaccaggtggtgccccctgcaggtgatgatgaggtcaccgttggcaagttctacgccacgttcctgatccaggagtacttccggaagttcaagaagcgcaaagagcagggccttgtgggcaagccctcccagaggaacgcgctgtctctgcaggctggcttgcgcacactgcatgacatcgggcctgagatccgacgggccatctctggagatctcaccgctgaggaggagctggacaaggccatgaaggaggctgtgtccgctgcttctgaagatgacatcttcaggagggccggtggcctgttcggcaaccacgtcagctactaccaaagcgacggccggagcgccttcccccagaccttcaccactcagcgcccgctgcacatcaacaaggcgggcagcagccagggcgacactgagtcgccatcccacgagaagctggtggactccaccttcaccccgagcagctactcgtccaccggctccaacgccaacatcaacaacgccaacaacaccgccctgggtcgcctccctcgccccgccggctaccccagcacggtcagcactgtggagggccacgggccccccttgtcccctgccatccgggtgcaggaggtggcgtggaagctcagctccaacaggtgccactcccgggagagccaggcagccatggcgggtcaggaggagacgtctcaggatgagacctatgaagtgaagatgaaccatgacacggaggcctgcagtgagcccagcctgctctccacagagatgctctcctaccaggatgacgaaaatcggcaactgacgctcccagaggaggacaagagggacatccggcaatctccgaagaggggtttcctccgctctgcctcactaggtcgaagggcctccttccacctggaatgtctgaagcgacagaaggaccgagggggagacatctctcagaagacagtcctgcccttgcatctggttcatcatcaggcattggcagtggcaggcctgagccccctcctccagagaagccattcccctgcctcattccctaggccttttgccaccccaccagccacacctggcagccgaggctggcccccacagcccgtccccaccctgcggcttgagggggtcgagtccagtgagaaactcaacagcagcttcccatccatccactgcggctcctgggctgagaccacccccggtggcgggggcagcagcgccgcccggagagtccggcccgtctccctcatggtgcccagccaggctggggccccagggaggcagttccacggcagtgccagcagcctggtggaagcggtcttgatttcagaaggactggggcagtttgctcaagatcccaagttcatcgaggtcaccacccaggagctggccgacgcctgcgacatgaccatagaggagatggagagcgcggccgacaacatcctcagcgggggcgccccacagagccccaatggcgccctcttaccctttgtgaactgcagggacgcggggcaggaccgagccgggggcgaagaggacgcgggctgtgtgcgcgcgcggggtcgaccgagtgaggaggagctccaggacagcagggtctacgtcagcagcctgtagtgggcgctgccagatgcgggcttttttttatttgtttcaatgttcctaatgggttcgtttcagaagtgcctcactgttctcgtgacctggagttaaccggaacagcgtcttcattcatttctgttgggaccagacgcggagcctgggtgcgcgagccgccctccgggaggaaggcgcccggctgcgtctgcagaggcggggagaggaggcggcgagggtcccggggcgcgaggaaggcgcctgccctctcccagctcgcaggccccgggcccggccgcgcctccgcggggagagcaccccggcttcccgcgcgccctcaccaaaaggaccctacagcaaacgggtgtctttcgactctgcttgtagaaaccatttgcacatattctgtacgagcctcgctgtctccctagagccagggccctgcggatttggagaagggagcggggcaggacttccaggaggaccccaacccggcccggagagggaggaggaggcctccaggggcgcggagctctggggatgggcgtcgggccggcagtggtgcggctcactccgtccctgcccacctgcgacgggatcccccgaccggcacgggccacgccgagctcccggccagccgccggcccgcaggcagcgcgagggaggagctgcgccgccggctccgcccaaccaggtggtgctgagcttccgctgagcgctcttttgttttgtggtttgacacttttcttgacagcatgttgcagtttcttttcggttttggttttttttaaatgttttattttgctttcccagcgggaggggaggaagaagagtgtttacaaagtcctgtagccccctcacctttctgttttcacttttgccaatgtacatcgggtttggttttcttgtattatttaaacggttgtggtttcctttttccacggaggttcaatagaagccgctgcaggagagttttaccaaccattgtgtatgcccaataatttgttatcatttccttaggtagtaacctatttttgttctggtttggttcggttatctaatggaaaggtaactggcaatgcacttgatgtggtcttgcacatgtgggtgatagagttgggttcctttttatgctgggtgtacaggtgggtttgggagagaggagcatgcgcgagagagtctccgagtgtgtgcgacgcgtgtgtgtgtggtgggttgtctgtgtgcatatgtcctgcccgtgtatatgcacccacaccatgtgcccgtgcacaccagtgactacgcagtcccccctttctggtttagctgtgggaagatctgaatctggggccgtttgaaagcaaaaacaaaccactgtctctgcttctgaaacgggaatcagtaactctttgcattttctgtcccacaagatatgcaaaaacaatgcaataatattcatttaaaaatacaattgtgagttgtgttggcattaaaactgtattttaaaaaaagacagaaatttaagggaaaaacacaagaaggcattttgcttcaatatattccgtgtaatgttttattgcattgataatgtttctgttgaagaaaccgttatacttgaattcaggtcagtttcagtatttttcaaatatttttttaaaactgaattgcaattgtgccaagcgaatataatgaattgaattaagttggttttcggattcacttcttgtatattttgctgcatgtaaagtaaatcattttgtatttggagtgtgacaagctttacctttgaactcaagtgcttttctatatgtggttgggggaaagggaacaagttttctttagtttgcacaatgagcaaaggtatcaccagtgtagtcattattctgctctccacaaacaggtttggacattactgttttgcatatcttgtgtttgcttacatttccctcaatttttccaaaatcgtttgctgggtatgtttgtaccgcctcttgctgtgagagaccaggacctattttattccagtcttcactctgtccactctgctctggtcatctgatttggtacttctccaagaacagcccttcactgtgaggtgcagggaggcgttctgatgagccctcagtcactgggccgtcatccgcatcccccatggaagaggtagctggctttcccttcccttccaccacacggaattttctctttggcttccttaggaaagtgtacactaaccgggaggataaaattaaagtcaggctgcttggagggaggggcatcctcacttccggattcttgttgctctacccaacaaggacagcaggggctcgagaaaggaactggtgaaaccctgatccatctgaaagtcaactctgcgtgctcctttctccatcccttcctcactctggagcagcctttccttcaggcttgccctaatgtttgggctgccggggagggggccaggacaagggaagaggcatccggagctcacagtgggggtgggaacagatttttgtgggggcatctctaatgctcacttatatctccctagaacatcactcttttggtgctgtgtccttcaaatgtatgtcaacagtggtggctgaaaagggactgctttggggaaaacaggacccaaccattcacccagaattgacccattaaatctcttccagtcctagtgttccctgagcccctcttggcacatatataagtaagctagaaattacaataagggacagtccattcctctatgacagcttgctggactgattcatgacaaagtggagaaatgtactcaatactccccggttaacacagtctagaaacagagtttctttatggatatccacacccaagtcatccaaactttcttgattccttttcactgccatcaaggtcctctagaaattgagtttaggtatcatcctttgaaaagttcccaagatttctaccaggaggtacacacaggcgttccctgtctagggcaggaggactatcctagcttgaccttctgatccactagaataagactggcgtatgatgcctgtcatcagaacagactggcacaagtagtgacatcaatgaaccacagcacaatcttccaagtgatgtctactctccacctaaaatggaattttccccatgaccttgtaaaacataattgtcacatcttccatacccctcctgacagcccccaagtgtcaggagaaaacagtcaggggctaagggcccaagggacttgaagaaacaacagtttaaggtctgcagtttggtcaacttaattcttgtcctccgaccagccctgcctctttcatttccagaccttggagaatttttcccagctttgattcagaaggtactagttataacccctttccttcttcttaatccaataggcctcactctcactgggaaatccactcaaaggaacaaggcaatgtctctcattctatttcccagttccaaattccaggtgcttgtctggagtgaagctacccgttactttctcccagcttttctccacccagcatgtctcctgcccatgcagctgaagacagtggggcaacctcaggagaagcagacctttccatgcccaagttcatctcctgagcaacagtgacacctagaaaatgaggactttggaagtcacccaaaagatggtggctactttatggagtcctgaagatacacagccaccactcctaaaggcaaagaaagaaaacacgaatgtaggtcagggatagagtggaaccctggtcatcggggtttttagcctcatcgtgggaaaggtggtaaaggaggatgatggcatctccatccctagaggccaagaattgaaatatcattgtcaaggattagaaacaattcagcaaagaggccacaaaaagggcctgctgactcccagaagacctctttaaaccccaggggaggcaaatacttgctgatggagtctgggccgtttccatattttaaagaagacctgcctctggggcaaatgtcagcacagagaggactgggaggagaatggaggcaagaaaagggcatattttgactccctctgtgcctcttcccagttcatggaaggatgtgttcagcttacccacccacagtgaccagtgtggtggagccgctgacatctcaaggatctatttgggaaggtgagaagagtactcattccatctgggggtgttgttccagccacatcagcctacctggtgggatgtgggggtgtctgccaccctgtcccccctctgctgatgtccctcccctcaggctgtccaggtgccacctgacacaggctgctgtgcaaagacaggcggggaagcccaaacctcactcccagggaggccctcagccgccagagtccaggttctccagaggctacgatttgaggaggttgagggggaagacaggagggaaagaaaagtcctacaactgtcaggaatggggcacctttccctgtccctaagcaaagctccctcttcccactgccctccccagccccagctccctgtcctccccaacacctagtgagaaagacggtgcgtggaagggagtcccatgggcagatgcttacacgacctctttgtgaagcctcttctgggtttaacttcattcatcaatttattcttatgtcaaagcaatgaaacttttctttctggagccagataccaatacaacaggtgaacgggtttctgccacatctctacattgacgggggatgcttgaacaacccccctcactacacagacacacaccgttaaggcacaagggctggggttgagctctagatgagggactttcctgctcctgcaagggtgagcactgtatacacagacaaggagggtgcagtagagtgactcccttggatggaagtagtaccatcagaacctactattattatgacataaattctatttacatacattgagagaatactacaatcaacactttttcctgggatgactttaagaggtttgagccacagcacctgaagtggcaaagatccatggtctttgtagggtattagagaactcttccagtcacctctgaaagcactctagatcttgcagctgagtggatgaagtgtaacaaatctgttgcacgctgagaggagtcagaattagcatttttcatgaaagttccccacgtctctactaagaatgaggaagaaaagactaagactaggtaattacacagaggcttgaaatgttacatcaccagagccaagtcctctcccttcagatcagttactggctgctacacagggacacccccaccttttcagggcatcccatgcactccacttctcaggatctaaggaatttgactttgtagggatcccagaaagggcactgtgccacttcccctggtgtgaatcagacatacattgtacattcatttctaaaattcactcatgcacctcaaaccaaggtcattatccaaaaaaaaaaaaaaaaagctctgggtggaagagtttgtaagttttaagagagggtcatttctatgtgaggaaatgcagaaatggacagaatgattcttattcactgtttgggtctggagaattcccattgtggaaatcttagagatctcaagtttattaccaagggaataaggaaaaaaaggtgagcaggcaccaggccaagcagtggctcccttgccaaggaacctgaggctgcaggtttcagggacccccttgaagaaacctctcctggccattggccaggagaaaagagaagtctctcctgtagagtcacaagagaagcaaaagagggtgggtcactgggtcctggacatagcccccaaccccaagacttcccaatatggagaaactacaccaatgtttaaaaggggaaaaggaaagaacttgtacatcaagggaagatgatttgtaaacacacagtcctgtgcagaaagatccccttcaggaggtgtctccagcatcccaaagctgtgcgcaccttctcttttcctgcctcaggccacctatgcatccagctgcagcccatacccacacctgaaatccatctcttgaatcccagccaggttatataccaccccattgccatgtcctgtcctggccagaatgcatgctgttcccccaagcctcgtgggagtgaggccatgggaaacagagatgagcatgtctggacaagtctgtgatggtagtggatgagaataacccatggcaaaacacgcacattcattaagaaatagggcgacagattccccgttggtgaagcactgaaaggtctattactctcataatattgctgttttattttaatccaccagagctaccatgcaaaactttcctcctgtgaaacgctccagataaagctcctctaatctccccttccctcatgtcctccagctcaaacccaccttcatcccccaaaccaatctgtatcatgcctgttatcagagaggcacagaaagatgggcagtgcctccgttgtcaccattccccacacccctacacacccccacaccctcccctccaggctccacgacttcacagtcttactgttgtaaatatcattgtacagtttgtaatcctcaaataatcccattgtcagaggcctcgcctgatgggccttctcaccctcgagaaaggccagggaatctagaaggggcaacccttcaaggagagcttcagggtcatctctgtgtgagacactattgtatattcctgtaagattgcatttttatctaaggaatgatgttatttaaaaaacaaacaaaaaacacaaaaaataagaattgcaaataaatttcttaacaatgtct

SEQ ID NO: 37 - protein, 2138 aa, Homo sapiens
  ref <308>: DATABASE ACCESSION NUMBER: NCBI / NP_001123315.1
  ref <309>: DATABASE ENTRY DATE: 2014-05-14
  ref <313>: RELEVANT RESIDUES IN SEQ ID NO: (1)..(2138)
MVNENTRMYIPEENHQGSNYGSPRPAHANMNANAAAGLAPEHIPTPGAALSWQAAIDAARQAKLMGSAGNATISTVSSTQRKRQQYGKPKKQGSTTATRPPRALLCLTLKNPIRRACISIVEWKPFEIIILLTIFANCVALAIYIPFPEDDSNATNSNLERVEYLFLIIFTVEAFLKVIAYGLLFHPNAYLRNGWNLLDFIIVVVGLFSAILEQATKADGANALGGKGAGFDVKALRAFRVLRPLRLVSGVPSLQVVLNSIIKAMVPLLHIALLVLFVIIIYAIIGLELFMGKMHKTCYNQEGIADVPAEDDPSPCALETGHGRQCQNGTVCKPGWDGPKHGITNFDNFAFAMLTVFQCITMEGWTDVLYWVNDAVGRDWPWIYFVTLIIIGSFFVLNLVLGVLSGEFSKEREKAKARGDFQKLREKQQLEEDLKGYLDWITQAEDIDPENEDEGMDEEKPRNMSMPTSETESVNTENVAGGDIEGENCGARLAHRISKSKFSRYWRRWNRFCRRKCRAAVKSNVFYWLVIFLVFLNTLTIASEHYNQPNWLTEVQDTANKALLALFTAEMLLKMYSLGLQAYFVSLFNRFDCFVVCGGILETILVETKIMSPLGISVLRCVRLLRIFKITRYWNSLSNLVASLLNSVRSIASLLLLLFLFIIIFSLLGMQLFGGKFNFDEMQTRRSTFDNFPQSLLTVFQILTGEDWNSVMYDGIMAYGGPSFPGMLVCIYFIILFICGNYILLNVFLAIAVDNLADAESLTSAQKEEEEEKERKKLARTASPEKKQELVEKPAVGESKEEKIELKSITADGESPPATKINMDDLQPNENEDKSPYPNPETTGEEDEEEPEMPVGPRPRPLSELHLKEKAVPMPEASAFFIFSSNNRFRLQCHRIVNDTIFTNLILFFILLSSISLAAEDPVQHTSFRNHILGNADYVFTSIFTLEIILKMTAYGAFLHKGSFCRNYFNILDLLVVSVSLISFGIQSSAINVVKILRVLRVLRPLRAINRAKGLKHVVQCVFVAIRTIGNIVIVTTLLQFMFACIGVQLFKGKLYTCSDSSKQTEAECKGNYITYKDGEVDHPIIQPRSWENSKFDFDNVLAAMMALFTVSTFEGWPELLYRSIDSHTEDKGPIYNYRVEISIFFIIYIIIIAFFMMNIFVGFVIVTFQEQGEQEYKNCELDKNQRQCVEYALKARPLRRYIPKNQHQYKVWYVVNSTYFEYLMFVLILLNTICLAMQHYGQSCLFKIAMNILNMLFTGLFTVEMILKLIAFKPKHYFCDAWNTFDALIVVGSIVDIAITEVNPAEHTQCSPSMNAEENSRISITFFRLFRVMRLVKLLSRGEGIRTLLWTFIKSFQALPYVALLIVMLFFIYAVIGMQVFGKIALNDTTEINRNNNFQTFPQAVLLLFRCATGEAWQDIMLACMPGKKCAPESEPSNSTEGETPCGSSFAVFYFISFYMLCAFLIINLFVAVIMDNFDYLTRDWSILGPHHLDEFKRIWAEYDPEAKGRIKHLDVVTLLRRIQPPLGFGKLCPHRVACKRLVSMNMPLNSDGTVMFNATLFALVRTALRIKTEGNLEQANEELRAIIKKIWKRTSMKLLDQVVPPAGDDEVTVGKFYATFLIQEYFRKFKKRKEQGLVGKPSQRNALSLQAGLRTLHDIGPEIRRAISGDLTAEEELDKAMKEAVSAASEDDIFRRAGGLFGNHVSYYQSDGRSAFPQTFTTQRPLHINKAGSSQGDTESPSHEKLVDSTFTPSSYSSTGSNANINNANNTALGRLPRPAGYPSTVSTVEGHGPPLSPAIRVQEVAWKLSSNRCHSRESQAAMAGQEETSQDETYEVKMNHDTEACSEPSLLSTEMLSYQDDENRQLTLPEEDKRDIRQSPKRGFLRSASLGRRASFHLECLKRQKDRGGDISQKTVLPLHLVHHQALAVAGLSPLLQRSHSPASFPRPFATPPATPGSRGWPPQPVPTLRLEGVESSEKLNSSFPSIHCGSWAETTPGGGGSSAARRVRPVSLMVPSQAGAPGRQFHGSASSLVEAVLISEGLGQFAQDPKFIEVTTQELADACDMTIEEMESAADNILSGGAPQSPNGALLPFVNCRDAGQDRAGGEEDAGCVRARGRPSEEELQDSRVYVSSL

SEQ ID NO: 38 - DNA, 13471 bp, Homo sapiens
  ref <308>: DATABASE ACCESSION NUMBER: NCBI / NM_001129844.1
  ref <309>: DATABASE ENTRY DATE: 2014-05-14
  ref <313>: RELEVANT RESIDUES IN SEQ ID NO: (1)..(13471)
ttattttttcaaatggtgtagccgccggaggtgcggtgctcagttcttggaaggggcccggatgtactgaggatgcgttacagtttcactcgaggaggcagtagtggaaaggagcagtttttggggtttgatgccataatgggaatcaggtaatcgtcggcggggaagaagaaacgctgcagaccacggcttcctcgaatcttgcgcgaaagccgccggcctcggaggagggattaatccagacccgccggggggtgttttcacatttcttcctcttcgtggctgctcctcctattaaaaccatttttggtccatggtcaatgagaatacgaggatgtacattccagaggaaaaccaccaaggttccaactatgggagcccacgccccgcccatgccaacatgaatgccaatgcggcagcggggctggcccctgagcacatccccaccccgggggctgccctgtcgtggcaggcggccatcgacgcagcccggcaggctaagctgatgggcagcgctggcaatgcgaccatctccacagtcagctccacgcagcggaagcggcagcaatatgggaaacccaagaagcagggcagcaccacggccacacgcccgccccgagccctgctctgcctgaccctgaagaaccccatccggagggcctgcatcagcattgtcgaatggaaaccatttgaaataattattttactgactatttttgccaattgtgtggccttagcgatctatattccctttccagaagatgattccaacgccaccaattccaacctggaacgagtggaatatctctttctcataatttttacggtggaagcgtttttaaaagtaatcgcctatggactcctctttcaccccaatgcctacctccgcaacggctggaacctactagattttataattgtggttgtggggctttttagtgcaattttagaacaagcaaccaaagcagatggggcaaacgctctcggagggaaaggggccggatttgatgtgaaggcgctgagggccttccgcgtgctgcgccccctgcggctggtgtccggagtcccaagtctccaggtggtcctgaattccatcatcaaggccatggtccccctgctgcacatcgccctgcttgtgctgtttgtcatcatcatctacgccatcatcggcttggagctcttcatggggaagatgcacaagacctgctacaaccaggagggcatagcagcagaagatgacccttccccttgtgcgctggaaacgggccacgggcggcagtgccagaacggcacggtgtgcaagcccggctgggatggtcccaagcacggcatcaccaactttgacaactttgccttcgccatgctcacggtgttccagtgcatcaccatggagggctggacggacgtgctgtactgggtcaatgatgccgtaggaagggactggccctggatctattttgttacactaatcatcatagggtcattttttgtacttaacttggttctcggtgtgcttagcggagagttttccaaagagagggagaaggccaaggcccggggagatttccagaagctgcgggagaagcagcagctagaagaggatctcaaaggctacctggattggatcactcaggccgaagacatcgatcctgagaatgaggacgaaggcatggatgaggagaagccccgaaacatgagcatgcccaccagtgagaccgagtccgtcaacaccgaaaacgtggctggaggtgacatcgagggagaaaactgcggggccaggctggcccaccggatctccaagtcaaagttcagccgctactggcgccggtggaatcggttctgcagaaggaagtgccgcgccgcagtcaagtctaatgtcttctactggctggtgattttcctggtgttcctcaacacgctcaccattgcctctgagcactacaaccagcccaactggctcacagaagtccaagacacggcaaacaaggccctgctggccctgttcacggcagagatgctcctgaagatgtacagcctgggcctgcaggcctacttcgtgtccctcttcaaccgctttgactgcttcgtcgtgtgtggcggcatcctggagaccatcctggtggagaccaagatcatgtccccactgggcatctccgtgctcagatgcgtccggctgctgaggattttcaagatcacgaggtactggaactccttgagcaacctggtggcatccttgctgaactctgtgcgctccatcgcctccctgctccttctcctcttcctcttcatcatcatcttctccctcctggggatgcagctctttggaggaaagttcaactttgatgagatgcagacccggaggagcacattcgataacttcccccagtccctcctcactgtgtttcagatcctgaccggggaggactggaattcggtgatgtatgatgggatcatggcttatggcggcccctcttttccagggatgttagtctgtatttacttcatcatcctcttcatctgtggaaactatatcctactgaatgtgttcttggccattgctgtggacaacctggctgatgctgagagcctcacatctgcccaaaaggaggaggaagaggagaaggagagaaagaagctggccaggactgccagcccagagaagaaacaagagttggtggagaagccggcagtgggggaatccaaggaggagaagattgagctgaaatccatcacggctgacggagagtctccacccgccaccaagatcaacatggatgacctccagcccaatgaaaatgaggataagagcccctaccccaacccagaaactacaggagaagaggatgaggaggagccagagatgcctgtcggccctcgcccacgaccactctctgagcttcaccttaaggaaaaggcagtgcccatgccagaagccagcgcgtttttcatcttcagctctaacaacaggtttcgcctccagtgccaccgcattgtcaatgacacgatcttcaccaacctgatcctcttcttcattctgctcagcagcatttccctggctgctgaggacccggtccagcacacctccttcaggaaccatattctgttttattttgatattgtttttaccaccattttcaccattgaaattgctctgaagatgactgcttatggggctttcttgcacaagggttctttctgccggaactacttcaacatcctggacctgctggtggtcagcgtgtccctcatctcctttggcatccagtccagtgcaatcaatgtcgtgaagatcttgcgagtcctgcgagtactcaggcccctgagggccatcaacagggccaaggggctaaagcatgtggttcagtgtgtgtttgtcgccatccggaccatcgggaacatcgtgattgtcaccaccctgctgcagttcatgtttgcctgcatcggggtccagctcttcaagggaaagctgtacacctgttcagacagttccaagcagacagaggcggaatgcaagggcaactacatcacgtacaaagacggggaggttgaccaccccatcatccaaccccgcagctgggagaacagcaagtttgactttgacaatgttctggcagccatgatggccctcttcaccgtctccaccttcgaagggtggccagagctgctgtaccgctccatcgactcccacacggaagacaagggccccatctacaactaccgtgtggagatctccatcttcttcatcatctacatcatcatcatcgccttcttcatgatgaacatcttcgtgggcttcgtcatcgtcacctttcaggagcagggggagcaggagtacaagaactgtgagctggacaagaaccagcgacagtgcgtggaatacgccctcaaggcccggcccctgcggaggtacatccccaagaaccagcaccagtacaaagtgtggtacgtggtcaactccacctacttcgagtacctgatgttcgtcctcatcctgctcaacaccatctgcctggccatgcagcactacggccagagctgcctgttcaaaatcgccatgaacatcctcaacatgctcttcactggcctcttcaccgtggagatgatcctgaagctcattgccttcaaacccaagggttactttagtgatccctggaatgtttttgacttcctcatcgtaattggcagcataattgacgtcattctcagtgagactaatccagctgaacatacccaatgctctccctctatgaacgcagaggaaaactcccgcatctccatcaccttcttccgcctgttccgggtcatgcgtctggtgaagctgctgagccgtggggagggcatccggacgctgctgtggaccttcatcaagtccttccaggccctgccctatgtggccctcctgatcgtgatgctgttcttcatctacgcggtgatcgggatgcaggtgtttgggaaaattgccctgaatgataccacagagatcaaccggaacaacaactttcagaccttcccccaggccgtgctgctcctcttcaggtgtgccaccggggaggcctggcaggacatcatgctggcctgcatgccaggcaagaagtgtgccccagagtccgagcccagcaacagcacggagggtgaaacaccctgtggtagcagctttgctgtcttctacttcatcagcttctacatgctctgtgccttcctgatcatcaacctctttgtagctgtcatcatggacaactttgactacctgacaagggactggtccatccttggtccccaccacctggatgagtttaaaagaatctgggcagagtatgaccctgaagccaagggtcgtatcaaacacctggatgtggtgaccctcctccggcggattcagccgccactaggttttgggaagctgtgccctcaccgcgtggcttgcaaacgcctggtctccatgaacatgcctctgaacagcgacgggacagtcatgttcaatgccaccctgtttgccctggtcaggacggccctgaggatcaaaacagaagggaacctagaacaagccaatgaggagctgcgggcgatcatcaagaagatctggaagcggaccagcatgaagctgctggaccaggtggtgccccctgcaggtgatgatgaggtcaccgttggcaagttctacgccacgttcctgatccaggagtacttccggaagttcaagaagcgcaaagagcagggccttgtgggcaagccctcccagaggaacgcgctgtctctgcaggctggcttgcgcacactgcatgacatcgggcctgagatccgacgggccatctctggagatctcaccgctgaggaggagctggacaaggccatgaaggaggctgtgtccgctgcttctgaagatgacatcttcaggagggccggtggcctgttcggcaaccacgtcagctactaccaaagcgacggccggagcgccttcccccagaccttcaccactcagcgcccgctgcacatcaacaaggcgggcagcagccagggcgacactgagtcgccatcccacgagaagctggtggactccaccttcaccccgagcagctactcgtccaccggctccaacgccaacatcaacaacgccaacaacaccgccctgggtcgcctccctcgccccgccggctaccccagcacggtcagcactgtggagggccacgggccccccttgtcccctgccatccgggtgcaggaggtggcgtggaagctcagctccaacaggtgccactcccgggagagccaggcagccatggcgggtcaggaggagacgtctcaggatgagacctatgaagtgaagatgaaccatgacacggaggcctgcagtgagcccagcctgctctccacagagatgctctcctaccaggatgacgaaaatcggcaactgacgctcccagaggaggacaagagggacatccggcaatctccgaagaggggtttcctccgctctgcctcactaggtcgaagggcctccttccacctggaatgtctgaagcgacagaaggaccgagggggagacatctctcagaagacagtcctgcccttgcatctggttcatcatcaggcattggcagtggcaggcctgagccccctcctccagagaagccattcccctgcctcattccctaggccttttgccaccccaccagccacacctggcagccgaggctggcccccacagcccgtccccaccctgcggcttgagggggtcgagtccagtgagaaactcaacagcagcttcccatccatccactgcggctcctgggctgagaccacccccggtggcgggggcagcagcgccgcccggagagtccggcccgtctccctcatggtgcccagccaggctggggccccagggaggcagttccacggcagtgccagcagcctggtggaagcggtcttgatttcagaaggactggggcagtttgctcaagatcccaagttcatcgaggtcaccacccaggagctggccgacgcctgcgacatgaccatagaggagatggagagcgcggccgacaacatcctcagcgggggcgccccacagagccccaatggcgccctcttaccctttgtgaactgcagggacgcggggcaggaccgagccgggggcgaagaggacgcgggctgtgtgcgcgcgcggggtcgaccgagtgaggaggagctccaggacagcagggtctacgtcagcagcctgtagtgggcgctgccagatgcgggcttttttttatttgtttcaatgttcctaatgggttcgtttcagaagtgcctcactgttctcgtgacctggagttaaccggaacagcgtcttcattcatttctgttgggaccagacgcggagcctgggtgcgcgagccgccctccgggaggaaggcgcccggctgcgtctgcagaggcggggagaggaggcggcgagggtcccggggcgcgaggaaggcgcctgccctctcccagctcgcaggccccgggcccggccgcgcctccgcggggagagcaccccggcttcccgcgcgccctcaccaaaaggaccctacagcaaacgggtgtctttcgactctgcttgtagaaaccatttgcacatattctgtacgagcctcgctgtctccctagagccagggccctgcggatttggagaagggagcggggcaggacttccaggaggaccccaacccggcccggagagggaggaggaggcctccaggggcgcggagctctggggatgggcgtcgggccggcagtggtgcggctcactccgtccctgcccacctgcgacgggatcccccgaccggcacgggccacgccgagctcccggccagccgccggcccgcaggcagcgcgagggaggagctgcgccgccggctccgcccaaccaggtggtgctgagcttccgctgagcgctcttttgttttgtggtttgacacttttcttgacagcatgttgcagtttcttttcggttttggttttttttaaatgttttattttgctttcccagcgggaggggaggaagaagagtgtttacaaagtcctgtagccccctcacctttctgttttcacttttgccaatgtacatcgggtttggttttcttgtattatttaaacggttgtggtttcctttttccacggaggttcaatagaagccgctgcaggagagttttaccaaccattgtgtatgcccaataatttgttatcatttccttaggtagtaacctatttttgttctggtttggttcggttatctaatggaaaggtaactggcaatgcacttgatgtggtcttgcacatgtgggtgatagagttgggttcctttttatgctgggtgtacaggtgggtttgggagagaggagcatgcgcgagagagtctccgagtgtgtgcgacgcgtgtgtgtgtggtgggttgtctgtgtgcatatgtcctgcccgtgtatatgcacccacaccatgtgcccgtgcacaccagtgactacgcagtcccccctttctggtttagctgtgggaagatctgaatctggggccgtttgaaagcaaaaacaaaccactgtctctgcttctgaaacgggaatcagtaactctttgcattttctgtcccacaagatatgcaaaaacaatgcaataatattcatttaaaaatacaattgtgagttgtgttggcattaaaactgtattttaaaaaaagacagaaatttaagggaaaaacacaagaaggcattttgcttcaatatattccgtgtaatgttttattgcattgataatgtttctgttgaagaaaccgttatacttgaattcaggtcagtttcagtatttttcaaatatttttttaaaactgaattgcaattgtgccaagcgaatataatgaattgaattaagttggttttcggattcacttcttgtatattttgctgcatgtaaagtaaatcattttgtatttggagtgtgacaagctttacctttgaactcaagtgcttttctatatgtggttgggggaaagggaacaagttttctttagtttgcacaatgagcaaaggtatcaccagtgtagtcattattctgctctccacaaacaggtttggacattactgttttgcatatcttgtgtttgcttacatttccctcaatttttccaaaatcgtttgctgggtatgtttgtaccgcctcttgctgtgagagaccaggacctattttattccagtcttcactctgtccactctgctctggtcatctgatttggtacttctccaagaacagcccttcactgtgaggtgcagggaggcgttctgatgagccctcagtcactgggccgtcatccgcatcccccatggaagaggtagctggctttcccttcccttccaccacacggaattttctctttggcttccttaggaaagtgtacactaaccgggaggataaaattaaagtcaggctgcttggagggaggggcatcctcacttccggattcttgttgctctacccaacaaggacagcaggggctcgagaaaggaactggtgaaaccctgatccatctgaaagtcaactctgcgtgctcctttctccatcccttcctcactctggagcagcctttccttcaggcttgccctaatgtttgggctgccggggagggggccaggacaagggaagaggcatccggagctcacagtgggggtgggaacagatttttgtgggggcatctctaatgctcacttatatctccctagaacatcactcttttggtgctgtgtccttcaaatgtatgtcaacagtggtggctgaaaagggactgctttggggaaaacaggacccaaccattcacccagaattgacccattaaatctcttccagtcctagtgttccctgagcccctcttggcacatatataagtaagctagaaattacaataagggacagtccattcctctatgacagcttgctggactgattcatgacaaagtggagaaatgtactcaatactccccggttaacacagtctagaaacagagtttctttatggatatccacacccaagtcatccaaactttcttgattccttttcactgccatcaaggtcctctagaaattgagtttaggtatcatcctttgaaaagttcccaagatttctaccaggaggtacacacaggcgttccctgtctagggcaggaggactatcctagcttgaccttctgatccactagaataagactggcgtatgatgcctgtcatcagaacagactggcacaagtagtgacatcaatgaaccacagcacaatcttccaagtgatgtctactctccacctaaaatggaattttccccatgaccttgtaaaacataattgtcacatcttccatacccctcctgacagcccccaagtgtcaggagaaaacagtcaggggctaagggcccaagggacttgaagaaacaacagtttaaggtctgcagtttggtcaacttaattcttgtcctccgaccagccctgcctctttcatttccagaccttggagaatttttcccagctttgattcagaaggtactagttataacccctttccttcttcttaatccaataggcctcactctcactgggaaatccactcaaaggaacaaggcaatgtctctcattctatttcccagttccaaattccaggtgcttgtctggagtgaagctacccgttactttctcccagcttttctccacccagcatgtctcctgcccatgcagctgaagacagtggggcaacctcaggagaagcagacctttccatgcccaagttcatctcctgagcaacagtgacacctagaaaatgaggactttggaagtcacccaaaagatggtggctactttatggagtcctgaagatacacagccaccactcctaaaggcaaagaaagaaaacacgaatgtaggtcagggatagagtggaaccctggtcatcggggtttttagcctcatcgtgggaaaggtggtaaaggaggatgatggcatctccatccctagaggccaagaattgaaatatcattgtcaaggattagaaacaattcagcaaagaggccacaaaaagggcctgctgactcccagaagacctctttaaaccccaggggaggcaaatacttgctgatggagtctgggccgtttccatattttaaagaagacctgcctctggggcaaatgtcagcacagagaggactgggaggagaatggaggcaagaaaagggcatattttgactccctctgtgcctcttcccagttcatggaaggatgtgttcagcttacccacccacagtgaccagtgtggtggagccgctgacatctcaaggatctatttgggaaggtgagaagagtactcattccatctgggggtgttgttccagccacatcagcctacctggtgggatgtgggggtgtctgccaccctgtcccccctctgctgatgtccctcccctcaggctgtccaggtgccacctgacacaggctgctgtgcaaagacaggcggggaagcccaaacctcactcccagggaggccctcagccgccagagtccaggttctccagaggctacgatttgaggaggttgagggggaagacaggagggaaagaaaagtcctacaactgtcaggaatggggcacctttccctgtccctaagcaaagctccctcttcccactgccctccccagccccagctccctgtcctccccaacacctagtgagaaagacggtgcgtggaagggagtcccatgggcagatgcttacacgacctctttgtgaagcctcttctgggtttaacttcattcatcaatttattcttatgtcaaagcaatgaaacttttctttctggagccagataccaatacaacaggtgaacgggtttctgccacatctctacattgacgggggatgcttgaacaacccccctcactacacagacacacaccgttaaggcacaagggctggggttgagctctagatgagggactttcctgctcctgcaagggtgagcactgtatacacagacaaggagggtgcagtagagtgactcccttggatggaagtagtaccatcagaacctactattattatgacataaattctatttacatacattgagagaatactacaatcaacactttttcctgggatgactttaagaggtttgagccacagcacctgaagtggcaaagatccatggtctttgtagggtattagagaactcttccagtcacctctgaaagcactctagatcttgcagctgagtggatgaagtgtaacaaatctgttgcacgctgagaggagtcagaattagcatttttcatgaaagttccccacgtctctactaagaatgaggaagaaaagactaagactaggtaattacacagaggcttgaaatgttacatcaccagagccaagtcctctcccttcagatcagttactggctgctacacagggacacccccaccttttcagggcatcccatgcactccacttctcaggatctaaggaatttgactttgtagggatcccagaaagggcactgtgccacttcccctggtgtgaatcagacatacattgtacattcatttctaaaattcactcatgcacctcaaaccaaggtcattatccaaaaaaaaaaaaaaaaagctctgggtggaagagtttgtaagttttaagagagggtcatttctatgtgaggaaatgcagaaatggacagaatgattcttattcactgtttgggtctggagaattcccattgtggaaatcttagagatctcaagtttattaccaagggaataaggaaaaaaaggtgagcaggcaccaggccaagcagtggctcccttgccaaggaacctgaggctgcaggtttcagggacccccttgaagaaacctctcctggccattggccaggagaaaagagaagtctctcctgtagagtcacaagagaagcaaaagagggtgggtcactgggtcctggacatagcccccaaccccaagacttcccaatatggagaaactacaccaatgtttaaaaggggaaaaggaaagaacttgtacatcaagggaagatgatttgtaaacacacagtcctgtgcagaaagatccccttcaggaggtgtctccagcatcccaaagctgtgcgcaccttctcttttcctgcctcaggccacctatgcatccagctgcagcccatacccacacctgaaatccatctcttgaatcccagccaggttatataccaccccattgccatgtcctgtcctggccagaatgcatgctgttcccccaagcctcgtgggagtgaggccatgggaaacagagatgagcatgtctggacaagtctgtgatggtagtggatgagaataacccatggcaaaacacgcacattcattaagaaatagggcgacagattccccgttggtgaagcactgaaaggtctattactctcataatattgctgttttattttaatccaccagagctaccatgcaaaactttcctcctgtgaaacgctccagataaagctcctctaatctccccttccctcatgtcctccagctcaaacccaccttcatcccccaaaccaatctgtatcatgcctgttatcagagaggcacagaaagatgggcagtgcctccgttgtcaccattccccacacccctacacacccccacaccctcccctccaggctccacgacttcacagtcttactgttgtaaatatcattgtacagtttgtaatcctcaaataatcccattgtcagaggcctcgcctgatgggccttctcaccctcgagaaaggccagggaatctagaaggggcaacccttcaaggagagcttcagggtcatctctgtgtgagacactattgtatattcctgtaagattgcatttttatctaaggaatgatgttatttaaaaaacaaacaaaaaacacaaaaaataagaattgcaaataaatttcttaacaatgtct

SEQ ID NO: 39 - protein, 2135 aa, Homo sapiens
  ref <308>: DATABASE ACCESSION NUMBER: NCBI / NP_001123316.1
  ref <309>: DATABASE ENTRY DATE: 2014-05-14
  ref <313>: RELEVANT RESIDUES IN SEQ ID NO: (1)..(2135)
MVNENTRMYIPEENHQGSNYGSPRPAHANMNANAAAGLAPEHIPTPGAALSWQAAIDAARQAKLMGSAGNATISTVSSTQRKRQQYGKPKKQGSTTATRPPRALLCLTLKNPIRRACISIVEWKPFEIIILLTIFANCVALAIYIPFPEDDSNATNSNLERVEYLFLIIFTVEAFLKVIAYGLLFHPNAYLRNGWNLLDFIIVVVGLFSAILEQATKADGANALGGKGAGFDVKALRAFRVLRPLRLVSGVPSLQVVLNSIIKAMVPLLHIALLVLFVIIIYAIIGLELFMGKMHKTCYNQEGIAAEDDPSPCALETGHGRQCQNGTVCKPGWDGPKHGITNFDNFAFAMLTVFQCITMEGWTDVLYWVNDAVGRDWPWIYFVTLIIIGSFFVLNLVLGVLSGEFSKEREKAKARGDFQKLREKQQLEEDLKGYLDWITQAEDIDPENEDEGMDEEKPRNMSMPTSETESVNTENVAGGDIEGENCGARLAHRISKSKFSRYWRRWNRFCRRKCRAAVKSNVFYWLVIFLVFLNTLTIASEHYNQPNWLTEVQDTANKALLALFTAEMLLKMYSLGLQAYFVSLFNRFDCFVVCGGILETILVETKIMSPLGISVLRCVRLLRIFKITRYWNSLSNLVASLLNSVRSIASLLLLLFLFIIIFSLLGMQLFGGKFNFDEMQTRRSTFDNFPQSLLTVFQILTGEDWNSVMYDGIMAYGGPSFPGMLVCIYFIILFICGNYILLNVFLAIAVDNLADAESLTSAQKEEEEEKERKKLARTASPEKKQELVEKPAVGESKEEKIELKSITADGESPPATKINMDDLQPNENEDKSPYPNPETTGEEDEEEPEMPVGPRPRPLSELHLKEKAVPMPEASAFFIFSSNNRFRLQCHRIVNDTIFTNLILFFILLSSISLAAEDPVQHTSFRNHILFYFDIVFTTIFTIEIALKMTAYGAFLHKGSFCRNYFNILDLLVVSVSLISFGIQSSAINVVKILRVLRVLRPLRAINRAKGLKHVVQCVFVAIRTIGNIVIVTTLLQFMFACIGVQLFKGKLYTCSDSSKQTEAECKGNYITYKDGEVDHPIIQPRSWENSKFDFDNVLAAMMALFTVSTFEGWPELLYRSIDSHTEDKGPIYNYRVEISIFFIIYIIIIAFFMMNIFVGFVIVTFQEQGEQEYKNCELDKNQRQCVEYALKARPLRRYIPKNQHQYKVWYVVNSTYFEYLMFVLILLNTICLAMQHYGQSCLFKIAMNILNMLFTGLFTVEMILKLIAFKPKGYFSDPWNVFDFLIVIGSIIDVILSETNPAEHTQCSPSMNAEENSRISITFFRLFRVMRLVKLLSRGEGIRTLLWTFIKSFQALPYVALLIVMLFFIYAVIGMQVFGKIALNDTTEINRNNNFQTFPQAVLLLFRCATGEAWQDIMLACMPGKKCAPESEPSNSTEGETPCGSSFAVFYFISFYMLCAFLIINLFVAVIMDNFDYLTRDWSILGPHHLDEFKRIWAEYDPEAKGRIKHLDVVTLLRRIQPPLGFGKLCPHRVACKRLVSMNMPLNSDGTVMFNATLFALVRTALRIKTEGNLEQANEELRAIIKKIWKRTSMKLLDQVVPPAGDDEVTVGKFYATFLIQEYFRKFKKRKEQGLVGKPSQRNALSLQAGLRTLHDIGPEIRRAISGDLTAEEELDKAMKEAVSAASEDDIFRRAGGLFGNHVSYYQSDGRSAFPQTFTTQRPLHINKAGSSQGDTESPSHEKLVDSTFTPSSYSSTGSNANINNANNTALGRLPRPAGYPSTVSTVEGHGPPLSPAIRVQEVAWKLSSNRCHSRESQAAMAGQEETSQDETYEVKMNHDTEACSEPSLLSTEMLSYQDDENRQLTLPEEDKRDIRQSPKRGFLRSASLGRRASFHLECLKRQKDRGGDISQKTVLPLHLVHHQALAVAGLSPLLQRSHSPASFPRPFATPPATPGSRGWPPQPVPTLRLEGVESSEKLNSSFPSIHCGSWAETTPGGGGSSAARRVRPVSLMVPSQAGAPGRQFHGSASSLVEAVLISEGLGQFAQDPKFIEVTTQELADACDMTIEEMESAADNILSGGAPQSPNGALLPFVNCRDAGQDRAGGEEDAGCVRARGRPSEEELQDSRVYVSSL

SEQ ID NO: 40 - DNA, 13447 bp, Homo sapiens
  ref <308>: DATABASE ACCESSION NUMBER: NCBI / NM_001129846.1
  ref <309>: DATABASE ENTRY DATE: 2014-05-14
  ref <313>: RELEVANT RESIDUES IN SEQ ID NO: (1)..(13447)
ttattttttcaaatggtgtagccgccggaggtgcggtgctcagttcttggaaggggcccggatgtactgaggatgcgttacagtttcactcgaggaggcagtagtggaaaggagcagtttttggggtttgatgccataatgggaatcaggtaatcgtcggcggggaagaagaaacgctgcagaccacggcttcctcgaatcttgcgcgaaagccgccggcctcggaggagggattaatccagacccgccggggggtgttttcacatttcttcctcttcgtggctgctcctcctattaaaaccatttttggtccatggtcaatgagaatacgaggatgtacattccagaggaaaaccaccaaggttccaactatgggagcccacgccccgcccatgccaacatgaatgccaatgcggcagcggggctggcccctgagcacatccccaccccgggggctgccctgtcgtggcaggcggccatcgacgcagcccggcaggctaagctgatgggcagcgctggcaatgcgaccatctccacagtcagctccacgcagcggaagcggcagcaatatgggaaacccaagaagcagggcagcaccacggccacacgcccgccccgagccctgctctgcctgaccctgaagaaccccatccggagggcctgcatcagcattgtcgaatggaaaccatttgaaataattattttactgactatttttgccaattgtgtggccttagcgatctatattccctttccagaagatgattccaacgccaccaattccaacctggaacgagtggaatatctctttctcataatttttacggtggaagcgtttttaaaagtaatcgcctatggactcctctttcaccccaatgcctacctccgcaacggctggaacctactagattttataattgtggttgtggggctttttagtgcaattttagaacaagcaaccaaagcagatggggcaaacgctctcggagggaaaggggccggatttgatgtgaaggcgctgagggccttccgcgtgctgcgccccctgcggctggtgtccggagtcccaagtctccaggtggtcctgaattccatcatcaaggccatggtccccctgctgcacatcgccctgcttgtgctgtttgtcatcatcatctacgccatcatcggcttggagctcttcatggggaagatgcacaagacctgctacaaccaggagggcatagcagatgttccagcagaagatgacccttccccttgtgcgctggaaacgggccacgggcggcagtgccagaacggcacggtgtgcaagcccggctgggatggtcccaagcacggcatcaccaactttgacaactttgccttcgccatgctcacggtgttccagtgcatcaccatggagggctggacggacgtgctgtactgggtcaatgatgccgtaggaagggactggccctggatctattttgttacactaatcatcatagggtcattttttgtacttaacttggttctcggtgtgcttagcggagagttttccaaagagagggagaaggccaaggcccggggagatttccagaagctgcgggagaagcagcagctagaagaggatctcaaaggctacctggattggatcactcaggccgaagacatcgatcctgagaatgaggacgaaggcatggatgaggagaagccccgaaacatgagcatgcccaccagtgagaccgagtccgtcaacaccgaaaacgtggctggaggtgacatcgagggagaaaactgcggggccaggctggcccaccggatctccaagtcaaagttcagccgctactggcgccggtggaatcggttctgcagaaggaagtgccgcgccgcagtcaagtctaatgtcttctactggctggtgattttcctggtgttcctcaacacgctcaccattgcctctgagcactacaaccagcccaactggctcacagaagtccaagacacggcaaacaaggccctgctggccctgttcacggcagagatgctcctgaagatgtacagcctgggcctgcaggcctacttcgtgtccctcttcaaccgctttgactgcttcgtcgtgtgtggcggcatcctggagaccatcctggtggagaccaagatcatgtccccactgggcatctccgtgctcagatgcgtccggctgctgaggattttcaagatcacgaggtactggaactccttgagcaacctggtggcatccttgctgaactctgtgcgctccatcgcctccctgctccttctcctcttcctcttcatcatcatcttctccctcctggggatgcagctctttggaggaaagttcaactttgatgagatgcagacccggaggagcacattcgataacttcccccagtccctcctcactgtgtttcagatcctgaccggggaggactggaattcggtgatgtatgatgggatcatggcttatggcggcccctcttttccagggatgttagtctgtatttacttcatcatcctcttcatctgtggaaactatatcctactgaatgtgttcttggccattgctgtggacaacctggctgatgctgagagcctcacatctgcccaaaaggaggaggaagaggagaaggagagaaagaagctggccaggactgccagcccagagaagaaacaagagttggtggagaagccggcagtgggggaatccaaggaggagaagattgagctgaaatccatcacggctgacggagagtctccacccgccaccaagatcaacatggatgacctccagcccaatgaaaatgaggataagagcccctaccccaacccagaaactacaggagaagaggatgaggaggagccagagatgcctgtcggccctcgcccacgaccactctctgagcttcaccttaaggaaaaggcagtgcccatgccagaagccagcgcgtttttcatcttcagctctaacaacaggtttcgcctccagtgccaccgcattgtcaatgacacgatcttcaccaacctgatcctcttcttcattctgctcagcagcatttccctggctgctgaggacccggtccagcacacctccttcaggaaccatatcctaggcaatgcagactatgtcttcactagtatctttacattagaaattatccttaagatgactgcttatggggctttcttgcacaagggttctttctgccggaactacttcaacatcctggacctgctggtggtcagcgtgtccctcatctcctttggcatccagtccagtgcaatcaatgtcgtgaagatcttgcgagtcctgcgagtactcaggcccctgagggccatcaacagggccaaggggctaaagcatgtggttcagtgtgtgtttgtcgccatccggaccatcgggaacatcgtgattgtcaccaccctgctgcagttcatgtttgcctgcatcggggtccagctcttcaagggaaagctgtacacctgttcagacagttccaagcagacagaggcggaatgcaagggcaactacatcacgtacaaagacggggaggttgaccaccccatcatccaaccccgcagctgggagaacagcaagtttgactttgacaatgttctggcagccatgatggccctcttcaccgtctccaccttcgaagggtggccagagctgctgtaccgctccatcgactcccacacggaagacaagggccccatctacaactaccgtgtggagatctccatcttcttcatcatctacatcatcatcatcgccttcttcatgatgaacatcttcgtgggcttcgtcatcgtcacctttcaggagcagggggagcaggagtacaagaactgtgagctggacaagaaccagcgacagtgcgtggaatacgccctcaaggcccggcccctgcggaggtacatccccaagaaccagcaccagtacaaagtgtggtacgtggtcaactccacctacttcgagtacctgatgttcgtcctcatcctgctcaacaccatctgcctggccatgcagcactacggccagagctgcctgttcaaaatcgccatgaacatcctcaacatgctcttcactggcctcttcaccgtggagatgatcctgaagctcattgccttcaaacccaagcactatttctgtgatgcatggaatacatttgacgccttgattgttgtgggtagcattgttgatatagcaatcaccgaggtaaacaacgcagaggaaaactcccgcatctccatcaccttcttccgcctgttccgggtcatgcgtctggtgaagctgctgagccgtggggagggcatccggacgctgctgtggaccttcatcaagtccttccaggccctgccctatgtggccctcctgatcgtgatgctgttcttcatctacgcggtgatcgggatgcaggtgtttgggaaaattgccctgaatgataccacagagatcaaccggaacaacaactttcagaccttcccccaggccgtgctgctcctcttcaggtgtgccaccggggaggcctggcaggacatcatgctggcctgcatgccaggcaagaagtgtgccccagagtccgagcccagcaacagcacggagggtgaaacaccctgtggtagcagctttgctgtcttctacttcatcagcttctacatgctctgtgccttcctgatcatcaacctctttgtagctgtcatcatggacaactttgactacctgacaagggactggtccatccttggtccccaccacctggatgagtttaaaagaatctgggcagagtatgaccctgaagccaagggtcgtatcaaacacctggatgtggtgaccctcctccggcggattcagccgccactaggttttgggaagctgtgccctcaccgcgtggcttgcaaacgcctggtctccatgaacatgcctctgaacagcgacgggacagtcatgttcaatgccaccctgtttgccctggtcaggacggccctgaggatcaaaacagaagggaacctagaacaagccaatgaggagctgcgggcgatcatcaagaagatctggaagcggaccagcatgaagctgctggaccaggtggtgccccctgcaggtgatgatgaggtcaccgttggcaagttctacgccacgttcctgatccaggagtacttccggaagttcaagaagcgcaaagagcagggccttgtgggcaagccctcccagaggaacgcgctgtctctgcaggctggcttgcgcacactgcatgacatcgggcctgagatccgacgggccatctctggagatctcaccgctgaggaggagctggacaaggccatgaaggaggctgtgtccgctgcttctgaagatgacatcttcaggagggccggtggcctgttcggcaaccacgtcagctactaccaaagcgacggccggagcgccttcccccagaccttcaccactcagcgcccgctgcacatcaacaaggcgggcagcagccagggcgacactgagtcgccatcccacgagaagctggtggactccaccttcaccccgagcagctactcgtccaccggctccaacgccaacatcaacaacgccaacaacaccgccctgggtcgcctccctcgccccgccggctaccccagcacggtcagcactgtggagggccacgggccccccttgtcccctgccatccgggtgcaggaggtggcgtggaagctcagctccaacaggtgccactcccgggagagccaggcagccatggcgggtcaggaggagacgtctcaggatgagacctatgaagtgaagatgaaccatgacacggaggcctgcagtgagcccagcctgctctccacagagatgctctcctaccaggatgacgaaaatcggcaactgacgctcccagaggaggacaagagggacatccggcaatctccgaagaggggtttcctccgctctgcctcactaggtcgaagggcctccttccacctggaatgtctgaagcgacagaaggaccgagggggagacatctctcagaagacagtcctgcccttgcatctggttcatcatcaggcattggcagtggcaggcctgagccccctcctccagagaagccattcccctgcctcattccctaggccttttgccaccccaccagccacacctggcagccgaggctggcccccacagcccgtccccaccctgcggcttgagggggtcgagtccagtgagaaactcaacagcagcttcccatccatccactgcggctcctgggctgagaccacccccggtggcgggggcagcagcgccgcccggagagtccggcccgtctccctcatggtgcccagccaggctggggccccagggaggcagttccacggcagtgccagcagcctggtggaagcggtcttgatttcagaaggactggggcagtttgctcaagatcccaagttcatcgaggtcaccacccaggagctggccgacgcctgcgacatgaccatagaggagatggagagcgcggccgacaacatcctcagcgggggcgccccacagagccccaatggcgccctcttaccctttgtgaactgcagggacgcggggcaggaccgagccgggggcgaagaggacgcgggctgtgtgcgcgcgcggggtcgaccgagtgaggaggagctccaggacagcagggtctacgtcagcagcctgtagtgggcgctgccagatgcgggcttttttttatttgtttcaatgttcctaatgggttcgtttcagaagtgcctcactgttctcgtgacctggagttaaccggaacagcgtcttcattcatttctgttgggaccagacgcggagcctgggtgcgcgagccgccctccgggaggaaggcgcccggctgcgtctgcagaggcggggagaggaggcggcgagggtcccggggcgcgaggaaggcgcctgccctctcccagctcgcaggccccgggcccggccgcgcctccgcggggagagcaccccggcttcccgcgcgccctcaccaaaaggaccctacagcaaacgggtgtctttcgactctgcttgtagaaaccatttgcacatattctgtacgagcctcgctgtctccctagagccagggccctgcggatttggagaagggagcggggcaggacttccaggaggaccccaacccggcccggagagggaggaggaggcctccaggggcgcggagctctggggatgggcgtcgggccggcagtggtgcggctcactccgtccctgcccacctgcgacgggatcccccgaccggcacgggccacgccgagctcccggccagccgccggcccgcaggcagcgcgagggaggagctgcgccgccggctccgcccaaccaggtggtgctgagcttccgctgagcgctcttttgttttgtggtttgacacttttcttgacagcatgttgcagtttcttttcggttttggttttttttaaatgttttattttgctttcccagcgggaggggaggaagaagagtgtttacaaagtcctgtagccccctcacctttctgttttcacttttgccaatgtacatcgggtttggttttcttgtattatttaaacggttgtggtttcctttttccacggaggttcaatagaagccgctgcaggagagttttaccaaccattgtgtatgcccaataatttgttatcatttccttaggtagtaacctatttttgttctggtttggttcggttatctaatggaaaggtaactggcaatgcacttgatgtggtcttgcacatgtgggtgatagagttgggttcctttttatgctgggtgtacaggtgggtttgggagagaggagcatgcgcgagagagtctccgagtgtgtgcgacgcgtgtgtgtgtggtgggttgtctgtgtgcatatgtcctgcccgtgtatatgcacccacaccatgtgcccgtgcacaccagtgactacgcagtcccccctttctggtttagctgtgggaagatctgaatctggggccgtttgaaagcaaaaacaaaccactgtctctgcttctgaaacgggaatcagtaactctttgcattttctgtcccacaagatatgcaaaaacaatgcaataatattcatttaaaaatacaattgtgagttgtgttggcattaaaactgtattttaaaaaaagacagaaatttaagggaaaaacacaagaaggcattttgcttcaatatattccgtgtaatgttttattgcattgataatgtttctgttgaagaaaccgttatacttgaattcaggtcagtttcagtatttttcaaatatttttttaaaactgaattgcaattgtgccaagcgaatataatgaattgaattaagttggttttcggattcacttcttgtatattttgctgcatgtaaagtaaatcattttgtatttggagtgtgacaagctttacctttgaactcaagtgcttttctatatgtggttgggggaaagggaacaagttttctttagtttgcacaatgagcaaaggtatcaccagtgtagtcattattctgctctccacaaacaggtttggacattactgttttgcatatcttgtgtttgcttacatttccctcaatttttccaaaatcgtttgctgggtatgtttgtaccgcctcttgctgtgagagaccaggacctattttattccagtcttcactctgtccactctgctctggtcatctgatttggtacttctccaagaacagcccttcactgtgaggtgcagggaggcgttctgatgagccctcagtcactgggccgtcatccgcatcccccatggaagaggtagctggctttcccttcccttccaccacacggaattttctctttggcttccttaggaaagtgtacactaaccgggaggataaaattaaagtcaggctgcttggagggaggggcatcctcacttccggattcttgttgctctacccaacaaggacagcaggggctcgagaaaggaactggtgaaaccctgatccatctgaaagtcaactctgcgtgctcctttctccatcccttcctcactctggagcagcctttccttcaggcttgccctaatgtttgggctgccggggagggggccaggacaagggaagaggcatccggagctcacagtgggggtgggaacagatttttgtgggggcatctctaatgctcacttatatctccctagaacatcactcttttggtgctgtgtccttcaaatgtatgtcaacagtggtggctgaaaagggactgctttggggaaaacaggacccaaccattcacccagaattgacccattaaatctcttccagtcctagtgttccctgagcccctcttggcacatatataagtaagctagaaattacaataagggacagtccattcctctatgacagcttgctggactgattcatgacaaagtggagaaatgtactcaatactccccggttaacacagtctagaaacagagtttctttatggatatccacacccaagtcatccaaactttcttgattccttttcactgccatcaaggtcctctagaaattgagtttaggtatcatcctttgaaaagttcccaagatttctaccaggaggtacacacaggcgttccctgtctagggcaggaggactatcctagcttgaccttctgatccactagaataagactggcgtatgatgcctgtcatcagaacagactggcacaagtagtgacatcaatgaaccacagcacaatcttccaagtgatgtctactctccacctaaaatggaattttccccatgaccttgtaaaacataattgtcacatcttccatacccctcctgacagcccccaagtgtcaggagaaaacagtcaggggctaagggcccaagggacttgaagaaacaacagtttaaggtctgcagtttggtcaacttaattcttgtcctccgaccagccctgcctctttcatttccagaccttggagaatttttcccagctttgattcagaaggtactagttataacccctttccttcttcttaatccaataggcctcactctcactgggaaatccactcaaaggaacaaggcaatgtctctcattctatttcccagttccaaattccaggtgcttgtctggagtgaagctacccgttactttctcccagcttttctccacccagcatgtctcctgcccatgcagctgaagacagtggggcaacctcaggagaagcagacctttccatgcccaagttcatctcctgagcaacagtgacacctagaaaatgaggactttggaagtcacccaaaagatggtggctactttatggagtcctgaagatacacagccaccactcctaaaggcaaagaaagaaaacacgaatgtaggtcagggatagagtggaaccctggtcatcggggtttttagcctcatcgtgggaaaggtggtaaaggaggatgatggcatctccatccctagaggccaagaattgaaatatcattgtcaaggattagaaacaattcagcaaagaggccacaaaaagggcctgctgactcccagaagacctctttaaaccccaggggaggcaaatacttgctgatggagtctgggccgtttccatattttaaagaagacctgcctctggggcaaatgtcagcacagagaggactgggaggagaatggaggcaagaaaagggcatattttgactccctctgtgcctcttcccagttcatggaaggatgtgttcagcttacccacccacagtgaccagtgtggtggagccgctgacatctcaaggatctatttgggaaggtgagaagagtactcattccatctgggggtgttgttccagccacatcagcctacctggtgggatgtgggggtgtctgccaccctgtcccccctctgctgatgtccctcccctcaggctgtccaggtgccacctgacacaggctgctgtgcaaagacaggcggggaagcccaaacctcactcccagggaggccctcagccgccagagtccaggttctccagaggctacgatttgaggaggttgagggggaagacaggagggaaagaaaagtcctacaactgtcaggaatggggcacctttccctgtccctaagcaaagctccctcttcccactgccctccccagccccagctccctgtcctccccaacacctagtgagaaagacggtgcgtggaagggagtcccatgggcagatgcttacacgacctctttgtgaagcctcttctgggtttaacttcattcatcaatttattcttatgtcaaagcaatgaaacttttctttctggagccagataccaatacaacaggtgaacgggtttctgccacatctctacattgacgggggatgcttgaacaacccccctcactacacagacacacaccgttaaggcacaagggctggggttgagctctagatgagggactttcctgctcctgcaagggtgagcactgtatacacagacaaggagggtgcagtagagtgactcccttggatggaagtagtaccatcagaacctactattattatgacataaattctatttacatacattgagagaatactacaatcaacactttttcctgggatgactttaagaggtttgagccacagcacctgaagtggcaaagatccatggtctttgtagggtattagagaactcttccagtcacctctgaaagcactctagatcttgcagctgagtggatgaagtgtaacaaatctgttgcacgctgagaggagtcagaattagcatttttcatgaaagttccccacgtctctactaagaatgaggaagaaaagactaagactaggtaattacacagaggcttgaaatgttacatcaccagagccaagtcctctcccttcagatcagttactggctgctacacagggacacccccaccttttcagggcatcccatgcactccacttctcaggatctaaggaatttgactttgtagggatcccagaaagggcactgtgccacttcccctggtgtgaatcagacatacattgtacattcatttctaaaattcactcatgcacctcaaaccaaggtcattatccaaaaaaaaaaaaaaaaagctctgggtggaagagtttgtaagttttaagagagggtcatttctatgtgaggaaatgcagaaatggacagaatgattcttattcactgtttgggtctggagaattcccattgtggaaatcttagagatctcaagtttattaccaagggaataaggaaaaaaaggtgagcaggcaccaggccaagcagtggctcccttgccaaggaacctgaggctgcaggtttcagggacccccttgaagaaacctctcctggccattggccaggagaaaagagaagtctctcctgtagagtcacaagagaagcaaaagagggtgggtcactgggtcctggacatagcccccaaccccaagacttcccaatatggagaaactacaccaatgtttaaaaggggaaaaggaaagaacttgtacatcaagggaagatgatttgtaaacacacagtcctgtgcagaaagatccccttcaggaggtgtctccagcatcccaaagctgtgcgcaccttctcttttcctgcctcaggccacctatgcatccagctgcagcccatacccacacctgaaatccatctcttgaatcccagccaggttatataccaccccattgccatgtcctgtcctggccagaatgcatgctgttcccccaagcctcgtgggagtgaggccatgggaaacagagatgagcatgtctggacaagtctgtgatggtagtggatgagaataacccatggcaaaacacgcacattcattaagaaatagggcgacagattccccgttggtgaagcactgaaaggtctattactctcataatattgctgttttattttaatccaccagagctaccatgcaaaactttcctcctgtgaaacgctccagataaagctcctctaatctccccttccctcatgtcctccagctcaaacccaccttcatcccccaaaccaatctgtatcatgcctgttatcagagaggcacagaaagatgggcagtgcctccgttgtcaccattccccacacccctacacacccccacaccctcccctccaggctccacgacttcacagtcttactgttgtaaatatcattgtacagtttgtaatcctcaaataatcccattgtcagaggcctcgcctgatgggccttctcaccctcgagaaaggccagggaatctagaaggggcaacccttcaaggagagcttcagggtcatctctgtgtgagacactattgtatattcctgtaagattgcatttttatctaaggaatgatgttatttaaaaaacaaacaaaaaacacaaaaaataagaattgcaaataaatttcttaacaatgtct

SEQ ID NO: 41 - protein, 2127 aa, Homo sapiens
  ref <308>: DATABASE ACCESSION NUMBER: NCBI / NP_001123318.1
  ref <309>: DATABASE ENTRY DATE: 2014-05-14
  ref <313>: RELEVANT RESIDUES IN SEQ ID NO: (1)..(2127)
MVNENTRMYIPEENHQGSNYGSPRPAHANMNANAAAGLAPEHIPTPGAALSWQAAIDAARQAKLMGSAGNATISTVSSTQRKRQQYGKPKKQGSTTATRPPRALLCLTLKNPIRRACISIVEWKPFEIIILLTIFANCVALAIYIPFPEDDSNATNSNLERVEYLFLIIFTVEAFLKVIAYGLLFHPNAYLRNGWNLLDFIIVVVGLFSAILEQATKADGANALGGKGAGFDVKALRAFRVLRPLRLVSGVPSLQVVLNSIIKAMVPLLHIALLVLFVIIIYAIIGLELFMGKMHKTCYNQEGIADVPAEDDPSPCALETGHGRQCQNGTVCKPGWDGPKHGITNFDNFAFAMLTVFQCITMEGWTDVLYWVNDAVGRDWPWIYFVTLIIIGSFFVLNLVLGVLSGEFSKEREKAKARGDFQKLREKQQLEEDLKGYLDWITQAEDIDPENEDEGMDEEKPRNMSMPTSETESVNTENVAGGDIEGENCGARLAHRISKSKFSRYWRRWNRFCRRKCRAAVKSNVFYWLVIFLVFLNTLTIASEHYNQPNWLTEVQDTANKALLALFTAEMLLKMYSLGLQAYFVSLFNRFDCFVVCGGILETILVETKIMSPLGISVLRCVRLLRIFKITRYWNSLSNLVASLLNSVRSIASLLLLLFLFIIIFSLLGMQLFGGKFNFDEMQTRRSTFDNFPQSLLTVFQILTGEDWNSVMYDGIMAYGGPSFPGMLVCIYFIILFICGNYILLNVFLAIAVDNLADAESLTSAQKEEEEEKERKKLARTASPEKKQELVEKPAVGESKEEKIELKSITADGESPPATKINMDDLQPNENEDKSPYPNPETTGEEDEEEPEMPVGPRPRPLSELHLKEKAVPMPEASAFFIFSSNNRFRLQCHRIVNDTIFTNLILFFILLSSISLAAEDPVQHTSFRNHILGNADYVFTSIFTLEIILKMTAYGAFLHKGSFCRNYFNILDLLVVSVSLISFGIQSSAINVVKILRVLRVLRPLRAINRAKGLKHVVQCVFVAIRTIGNIVIVTTLLQFMFACIGVQLFKGKLYTCSDSSKQTEAECKGNYITYKDGEVDHPIIQPRSWENSKFDFDNVLAAMMALFTVSTFEGWPELLYRSIDSHTEDKGPIYNYRVEISIFFIIYIIIIAFFMMNIFVGFVIVTFQEQGEQEYKNCELDKNQRQCVEYALKARPLRRYIPKNQHQYKVWYVVNSTYFEYLMFVLILLNTICLAMQHYGQSCLFKIAMNILNMLFTGLFTVEMILKLIAFKPKHYFCDAWNTFDALIVVGSIVDIAITEVNNAEENSRISITFFRLFRVMRLVKLLSRGEGIRTLLWTFIKSFQALPYVALLIVMLFFIYAVIGMQVFGKIALNDTTEINRNNNFQTFPQAVLLLFRCATGEAWQDIMLACMPGKKCAPESEPSNSTEGETPCGSSFAVFYFISFYMLCAFLIINLFVAVIMDNFDYLTRDWSILGPHHLDEFKRIWAEYDPEAKGRIKHLDVVTLLRRIQPPLGFGKLCPHRVACKRLVSMNMPLNSDGTVMFNATLFALVRTALRIKTEGNLEQANEELRAIIKKIWKRTSMKLLDQVVPPAGDDEVTVGKFYATFLIQEYFRKFKKRKEQGLVGKPSQRNALSLQAGLRTLHDIGPEIRRAISGDLTAEEELDKAMKEAVSAASEDDIFRRAGGLFGNHVSYYQSDGRSAFPQTFTTQRPLHINKAGSSQGDTESPSHEKLVDSTFTPSSYSSTGSNANINNANNTALGRLPRPAGYPSTVSTVEGHGPPLSPAIRVQEVAWKLSSNRCHSRESQAAMAGQEETSQDETYEVKMNHDTEACSEPSLLSTEMLSYQDDENRQLTLPEEDKRDIRQSPKRGFLRSASLGRRASFHLECLKRQKDRGGDISQKTVLPLHLVHHQALAVAGLSPLLQRSHSPASFPRPFATPPATPGSRGWPPQPVPTLRLEGVESSEKLNSSFPSIHCGSWAETTPGGGGSSAARRVRPVSLMVPSQAGAPGRQFHGSASSLVEAVLISEGLGQFAQDPKFIEVTTQELADACDMTIEEMESAADNILSGGAPQSPNGALLPFVNCRDAGQDRAGGEEDAGCVRARGRPSEEELQDSRVYVSSL

SEQ ID NO: 42 - DNA, 13480 bp, Homo sapiens
  ref <308>: DATABASE ACCESSION NUMBER: NCBI / NM_001167623.1
  ref <309>: DATABASE ENTRY DATE: 2014-05-10
  ref <313>: RELEVANT RESIDUES IN SEQ ID NO: (1)..(13480)
ttattttttcaaatggtgtagccgccggaggtgcggtgctcagttcttggaaggggcccggatgtactgaggatgcgttacagtttcactcgaggaggcagtagtggaaaggagcagtttttggggtttgatgccataatgggaatcaggtaatcgtcggcggggaagaagaaacgctgcagaccacggcttcctcgaatcttgcgcgaaagccgccggcctcggaggagggattaatccagacccgccggggggtgttttcacatttcttcctcttcgtggctgctcctcctattaaaaccatttttggtccatggtcaatgagaatacgaggatgtacattccagaggaaaaccaccaaggttccaactatgggagcccacgccccgcccatgccaacatgaatgccaatgcggcagcggggctggcccctgagcacatccccaccccgggggctgccctgtcgtggcaggcggccatcgacgcagcccggcaggctaagctgatgggcagcgctggcaatgcgaccatctccacagtcagctccacgcagcggaagcggcagcaatatgggaaacccaagaagcagggcagcaccacggccacacgcccgccccgagccctgctctgcctgaccctgaagaaccccatccggagggcctgcatcagcattgtcgaatggaaaccatttgaaataattattttactgactatttttgccaattgtgtggccttagcgatctatattccctttccagaagatgattccaacgccaccaattccaacctggaacgagtggaatatctctttctcataatttttacggtggaagcgtttttaaaagtaatcgcctatggactcctctttcaccccaatgcctacctccgcaacggctggaacctactagattttataattgtggttgtggggctttttagtgcaattttagaacaagcaaccaaagcagatggggcaaacgctctcggagggaaaggggccggatttgatgtgaaggcgctgagggccttccgcgtgctgcgccccctgcggctggtgtccggagtcccaagtctccaggtggtcctgaattccatcatcaaggccatggtccccctgctgcacatcgccctgcttgtgctgtttgtcatcatcatctacgccatcatcggcttggagctcttcatggggaagatgcacaagacctgctacaaccaggagggcatagcagatgttccagcagaagatgacccttccccttgtgcgctggaaacgggccacgggcggcagtgccagaacggcacggtgtgcaagcccggctgggatggtcccaagcacggcatcaccaactttgacaactttgccttcgccatgctcacggtgttccagtgcatcaccatggagggctggacggacgtgctgtactggatgcaggacgctatgggctatgagttaccctgggtgtattttgtcagtctggtcatctttggatcctttttcgttctaaatctggttctcggtgtgttgagcggagagttttccaaagagagggagaaggccaaggcccggggagatttccagaagctgcgggagaagcagcagctagaagaggatctcaaaggctacctggattggatcactcaggccgaagacatcgatcctgagaatgaggacgaaggcatggatgaggagaagccccgaaacatgagcatgcccaccagtgagaccgagtccgtcaacaccgaaaacgtggctggaggtgacatcgagggagaaaactgcggggccaggctggcccaccggatctccaagtcaaagttcagccgctactggcgccggtggaatcggttctgcagaaggaagtgccgcgccgcagtcaagtctaatgtcttctactggctggtgattttcctggtgttcctcaacacgctcaccattgcctctgagcactacaaccagcccaactggctcacagaagtccaagacacggcaaacaaggccctgctggccctgttcacggcagagatgctcctgaagatgtacagcctgggcctgcaggcctacttcgtgtccctcttcaaccgctttgactgcttcgtcgtgtgtggcggcatcctggagaccatcctggtggagaccaagatcatgtccccactgggcatctccgtgctcagatgcgtccggctgctgaggattttcaagatcacgaggtactggaactccttgagcaacctggtggcatccttgctgaactctgtgcgctccatcgcctccctgctccttctcctcttcctcttcatcatcatcttctccctcctggggatgcagctctttggaggaaagttcaactttgatgagatgcagacccggaggagcacattcgataacttcccccagtccctcctcactgtgtttcagatcctgaccggggaggactggaattcggtgatgtatgatgggatcatggcttatggcggcccctcttttccagggatgttagtctgtatttacttcatcatcctcttcatctgtggaaactatatcctactgaatgtgttcttggccattgctgtggacaacctggctgatgctgagagcctcacatctgcccaaaaggaggaggaagaggagaaggagagaaagaagctggccaggactgccagcccagagaagaaacaagagttggtggagaagccggcagtgggggaatccaaggaggagaagattgagctgaaatccatcacggctgacggagagtctccacccgccaccaagatcaacatggatgacctccagcccaatgaaaatgaggataagagcccctaccccaacccagaaactacaggagaagaggatgaggaggagccagagatgcctgtcggccctcgcccacgaccactctctgagcttcaccttaaggaaaaggcagtgcccatgccagaagccagcgcgtttttcatcttcagctctaacaacaggtttcgcctccagtgccaccgcattgtcaatgacacgatcttcaccaacctgatcctcttcttcattctgctcagcagcatttccctggctgctgaggacccggtccagcacacctccttcaggaaccatattctgttttattttgatattgtttttaccaccattttcaccattgaaattgctctgaagatgactgcttatggggctttcttgcacaagggttctttctgccggaactacttcaacatcctggacctgctggtggtcagcgtgtccctcatctcctttggcatccagtccagtgcaatcaatgtcgtgaagatcttgcgagtcctgcgagtactcaggcccctgagggccatcaacagggccaaggggctaaagcatgtggttcagtgtgtgtttgtcgccatccggaccatcgggaacatcgtgattgtcaccaccctgctgcagttcatgtttgcctgcatcggggtccagctcttcaagggaaagctgtacacctgttcagacagttccaagcagacagaggcggaatgcaagggcaactacatcacgtacaaagacggggaggttgaccaccccatcatccaaccccgcagctgggagaacagcaagtttgactttgacaatgttctggcagccatgatggccctcttcaccgtctccaccttcgaagggtggccagagctgctgtaccgctccatcgactcccacacggaagacaagggccccatctacaactaccgtgtggagatctccatcttcttcatcatctacatcatcatcatcgccttcttcatgatgaacatcttcgtgggcttcgtcatcgtcacctttcaggagcagggggagcaggagtacaagaactgtgagctggacaagaaccagcgacagtgcgtggaatacgccctcaaggcccggcccctgcggaggtacatccccaagaaccagcaccagtacaaagtgtggtacgtggtcaactccacctacttcgagtacctgatgttcgtcctcatcctgctcaacaccatctgcctggccatgcagcactacggccagagctgcctgttcaaaatcgccatgaacatcctcaacatgctcttcactggcctcttcaccgtggagatgatcctgaagctcattgccttcaaacccaagggttactttagtgatccctggaatgtttttgacttcctcatcgtaattggcagcataattgacgtcattctcagtgagactaatccagctgaacatacccaatgctctccctctatgaacgcagaggaaaactcccgcatctccatcaccttcttccgcctgttccgggtcatgcgtctggtgaagctgctgagccgtggggagggcatccggacgctgctgtggaccttcatcaagtccttccaggccctgccctatgtggccctcctgatcgtgatgctgttcttcatctacgcggtgatcgggatgcaggtgtttgggaaaattgccctgaatgataccacagagatcaaccggaacaacaactttcagaccttcccccaggccgtgctgctcctcttcaggtgtgccaccggggaggcctggcaggacatcatgctggcctgcatgccaggcaagaagtgtgccccagagtccgagcccagcaacagcacggagggtgaaacaccctgtggtagcagctttgctgtcttctacttcatcagcttctacatgctctgtgccttcctgatcatcaacctctttgtagctgtcatcatggacaactttgactacctgacaagggactggtccatccttggtccccaccacctggatgagtttaaaagaatctgggcagagtatgaccctgaagccaagggtcgtatcaaacacctggatgtggtgaccctcctccggcggattcagccgccactaggttttgggaagctgtgccctcaccgcgtggcttgcaaacgcctggtctccatgaacatgcctctgaacagcgacgggacagtcatgttcaatgccaccctgtttgccctggtcaggacggccctgaggatcaaaacagaagggaacctagaacaagccaatgaggagctgcgggcgatcatcaagaagatctggaagcggaccagcatgaagctgctggaccaggtggtgccccctgcaggtgatgatgaggtcaccgttggcaagttctacgccacgttcctgatccaggagtacttccggaagttcaagaagcgcaaagagcagggccttgtgggcaagccctcccagaggaacgcgctgtctctgcaggctggcttgcgcacactgcatgacatcgggcctgagatccgacgggccatctctggagatctcaccgctgaggaggagctggacaaggccatgaaggaggctgtgtccgctgcttctgaagatgacatcttcaggagggccggtggcctgttcggcaaccacgtcagctactaccaaagcgacggccggagcgccttcccccagaccttcaccactcagcgcccgctgcacatcaacaaggcgggcagcagccagggcgacactgagtcgccatcccacgagaagctggtggactccaccttcaccccgagcagctactcgtccaccggctccaacgccaacatcaacaacgccaacaacaccgccctgggtcgcctccctcgccccgccggctaccccagcacggtcagcactgtggagggccacgggccccccttgtcccctgccatccgggtgcaggaggtggcgtggaagctcagctccaacaggtgccactcccgggagagccaggcagccatggcgggtcaggaggagacgtctcaggatgagacctatgaagtgaagatgaaccatgacacggaggcctgcagtgagcccagcctgctctccacagagatgctctcctaccaggatgacgaaaatcggcaactgacgctcccagaggaggacaagagggacatccggcaatctccgaagaggggtttcctccgctctgcctcactaggtcgaagggcctccttccacctggaatgtctgaagcgacagaaggaccgagggggagacatctctcagaagacagtcctgcccttgcatctggttcatcatcaggcattggcagtggcaggcctgagccccctcctccagagaagccattcccctgcctcattccctaggccttttgccaccccaccagccacacctggcagccgaggctggcccccacagcccgtccccaccctgcggcttgagggggtcgagtccagtgagaaactcaacagcagcttcccatccatccactgcggctcctgggctgagaccacccccggtggcgggggcagcagcgccgcccggagagtccggcccgtctccctcatggtgcccagccaggctggggccccagggaggcagttccacggcagtgccagcagcctggtggaagcggtcttgatttcagaaggactggggcagtttgctcaagatcccaagttcatcgaggtcaccacccaggagctggccgacgcctgcgacatgaccatagaggagatggagagcgcggccgacaacatcctcagcgggggcgccccacagagccccaatggcgccctcttaccctttgtgaactgcagggacgcggggcaggaccgagccgggggcgaagaggacgcgggctgtgtgcgcgcgcggggtcgaccgagtgaggaggagctccaggacagcagggtctacgtcagcagcctgtagtgggcgctgccagatgcgggcttttttttatttgtttcaatgttcctaatgggttcgtttcagaagtgcctcactgttctcgtgacctggagttaaccggaacagcgtcttcattcatttctgttgggaccagacgcggagcctgggtgcgcgagccgccctccgggaggaaggcgcccggctgcgtctgcagaggcggggagaggaggcggcgagggtcccggggcgcgaggaaggcgcctgccctctcccagctcgcaggccccgggcccggccgcgcctccgcggggagagcaccccggcttcccgcgcgccctcaccaaaaggaccctacagcaaacgggtgtctttcgactctgcttgtagaaaccatttgcacatattctgtacgagcctcgctgtctccctagagccagggccctgcggatttggagaagggagcggggcaggacttccaggaggaccccaacccggcccggagagggaggaggaggcctccaggggcgcggagctctggggatgggcgtcgggccggcagtggtgcggctcactccgtccctgcccacctgcgacgggatcccccgaccggcacgggccacgccgagctcccggccagccgccggcccgcaggcagcgcgagggaggagctgcgccgccggctccgcccaaccaggtggtgctgagcttccgctgagcgctcttttgttttgtggtttgacacttttcttgacagcatgttgcagtttcttttcggttttggttttttttaaatgttttattttgctttcccagcgggaggggaggaagaagagtgtttacaaagtcctgtagccccctcacctttctgttttcacttttgccaatgtacatcgggtttggttttcttgtattatttaaacggttgtggtttcctttttccacggaggttcaatagaagccgctgcaggagagttttaccaaccattgtgtatgcccaataatttgttatcatttccttaggtagtaacctatttttgttctggtttggttcggttatctaatggaaaggtaactggcaatgcacttgatgtggtcttgcacatgtgggtgatagagttgggttcctttttatgctgggtgtacaggtgggtttgggagagaggagcatgcgcgagagagtctccgagtgtgtgcgacgcgtgtgtgtgtggtgggttgtctgtgtgcatatgtcctgcccgtgtatatgcacccacaccatgtgcccgtgcacaccagtgactacgcagtcccccctttctggtttagctgtgggaagatctgaatctggggccgtttgaaagcaaaaacaaaccactgtctctgcttctgaaacgggaatcagtaactctttgcattttctgtcccacaagatatgcaaaaacaatgcaataatattcatttaaaaatacaattgtgagttgtgttggcattaaaactgtattttaaaaaaagacagaaatttaagggaaaaacacaagaaggcattttgcttcaatatattccgtgtaatgttttattgcattgataatgtttctgttgaagaaaccgttatacttgaattcaggtcagtttcagtatttttcaaatatttttttaaaactgaattgcaattgtgccaagcgaatataatgaattgaattaagttggttttcggattcacttcttgtatattttgctgcatgtaaagtaaatcattttgtatttggagtgtgacaagctttacctttgaactcaagtgcttttctatatgtggttgggggaaagggaacaagttttctttagtttgcacaatgagcaaaggtatcaccagtgtagtcattattctgctctccacaaacaggtttggacattactgttttgcatatcttgtgtttgcttacatttccctcaatttttccaaaatcgtttgctgggtatgtttgtaccgcctcttgctgtgagagaccaggacctattttattccagtcttcactctgtccactctgctctggtcatctgatttggtacttctccaagaacagcccttcactgtgaggtgcagggaggcgttctgatgagccctcagtcactgggccgtcatccgcatcccccatggaagaggtagctggctttcccttcccttccaccacacggaattttctctttggcttccttaggaaagtgtacactaaccgggaggataaaattaaagtcaggctgcttggagggaggggcatcctcacttccggattcttgttgctctacccaacaaggacagcaggggctcgagaaaggaactggtgaaaccctgatccatctgaaagtcaactctgcgtgctcctttctccatcccttcctcactctggagcagcctttccttcaggcttgccctaatgtttgggctgccggggagggggccaggacaagggaagaggcatccggagctcacagtgggggtgggaacagatttttgtgggggcatctctaatgctcacttatatctccctagaacatcactcttttggtgctgtgtccttcaaatgtatgtcaacagtggtggctgaaaagggactgctttggggaaaacaggacccaaccattcacccagaattgacccattaaatctcttccagtcctagtgttccctgagcccctcttggcacatatataagtaagctagaaattacaataagggacagtccattcctctatgacagcttgctggactgattcatgacaaagtggagaaatgtactcaatactccccggttaacacagtctagaaacagagtttctttatggatatccacacccaagtcatccaaactttcttgattccttttcactgccatcaaggtcctctagaaattgagtttaggtatcatcctttgaaaagttcccaagatttctaccaggaggtacacacaggcgttccctgtctagggcaggaggactatcctagcttgaccttctgatccactagaataagactggcgtatgatgcctgtcatcagaacagactggcacaagtagtgacatcaatgaaccacagcacaatcttccaagtgatgtctactctccacctaaaatggaattttccccatgaccttgtaaaacataattgtcacatcttccatacccctcctgacagcccccaagtgtcaggagaaaacagtcaggggctaagggcccaagggacttgaagaaacaacagtttaaggtctgcagtttggtcaacttaattcttgtcctccgaccagccctgcctctttcatttccagaccttggagaatttttcccagctttgattcagaaggtactagttataacccctttccttcttcttaatccaataggcctcactctcactgggaaatccactcaaaggaacaaggcaatgtctctcattctatttcccagttccaaattccaggtgcttgtctggagtgaagctacccgttactttctcccagcttttctccacccagcatgtctcctgcccatgcagctgaagacagtggggcaacctcaggagaagcagacctttccatgcccaagttcatctcctgagcaacagtgacacctagaaaatgaggactttggaagtcacccaaaagatggtggctactttatggagtcctgaagatacacagccaccactcctaaaggcaaagaaagaaaacacgaatgtaggtcagggatagagtggaaccctggtcatcggggtttttagcctcatcgtgggaaaggtggtaaaggaggatgatggcatctccatccctagaggccaagaattgaaatatcattgtcaaggattagaaacaattcagcaaagaggccacaaaaagggcctgctgactcccagaagacctctttaaaccccaggggaggcaaatacttgctgatggagtctgggccgtttccatattttaaagaagacctgcctctggggcaaatgtcagcacagagaggactgggaggagaatggaggcaagaaaagggcatattttgactccctctgtgcctcttcccagttcatggaaggatgtgttcagcttacccacccacagtgaccagtgtggtggagccgctgacatctcaaggatctatttgggaaggtgagaagagtactcattccatctgggggtgttgttccagccacatcagcctacctggtgggatgtgggggtgtctgccaccctgtcccccctctgctgatgtccctcccctcaggctgtccaggtgccacctgacacaggctgctgtgcaaagacaggcggggaagcccaaacctcactcccagggaggccctcagccgccagagtccaggttctccagaggctacgatttgaggaggttgagggggaagacaggagggaaagaaaagtcctacaactgtcaggaatggggcacctttccctgtccctaagcaaagctccctcttcccactgccctccccagccccagctccctgtcctccccaacacctagtgagaaagacggtgcgtggaagggagtcccatgggcagatgcttacacgacctctttgtgaagcctcttctgggtttaacttcattcatcaatttattcttatgtcaaagcaatgaaacttttctttctggagccagataccaatacaacaggtgaacgggtttctgccacatctctacattgacgggggatgcttgaacaacccccctcactacacagacacacaccgttaaggcacaagggctggggttgagctctagatgagggactttcctgctcctgcaagggtgagcactgtatacacagacaaggagggtgcagtagagtgactcccttggatggaagtagtaccatcagaacctactattattatgacataaattctatttacatacattgagagaatactacaatcaacactttttcctgggatgactttaagaggtttgagccacagcacctgaagtggcaaagatccatggtctttgtagggtattagagaactcttccagtcacctctgaaagcactctagatcttgcagctgagtggatgaagtgtaacaaatctgttgcacgctgagaggagtcagaattagcatttttcatgaaagttccccacgtctctactaagaatgaggaagaaaagactaagactaggtaattacacagaggcttgaaatgttacatcaccagagccaagtcctctcccttcagatcagttactggctgctacacagggacacccccaccttttcagggcatcccatgcactccacttctcaggatctaaggaatttgactttgtagggatcccagaaagggcactgtgccacttcccctggtgtgaatcagacatacattgtacattcatttctaaaattcactcatgcacctcaaaccaaggtcattatccaaaaaaaaaaaaaaaaagctctgggtggaagagtttgtaagttttaagagagggtcatttctatgtgaggaaatgcagaaatggacagaatgattcttattcactgtttgggtctggagaattcccattgtggaaatcttagagatctcaagtttattaccaagggaataaggaaaaaaaggtgagcaggcaccaggccaagcagtggctcccttgccaaggaacctgaggctgcaggtttcagggacccccttgaagaaacctctcctggccattggccaggagaaaagagaagtctctcctgtagagtcacaagagaagcaaaagagggtgggtcactgggtcctggacatagcccccaaccccaagacttcccaatatggagaaactacaccaatgtttaaaaggggaaaaggaaagaacttgtacatcaagggaagatgatttgtaaacacacagtcctgtgcagaaagatccccttcaggaggtgtctccagcatcccaaagctgtgcgcaccttctcttttcctgcctcaggccacctatgcatccagctgcagcccatacccacacctgaaatccatctcttgaatcccagccaggttatataccaccccattgccatgtcctgtcctggccagaatgcatgctgttcccccaagcctcgtgggagtgaggccatgggaaacagagatgagcatgtctggacaagtctgtgatggtagtggatgagaataacccatggcaaaacacgcacattcattaagaaatagggcgacagattccccgttggtgaagcactgaaaggtctattactctcataatattgctgttttattttaatccaccagagctaccatgcaaaactttcctcctgtgaaacgctccagataaagctcctctaatctccccttccctcatgtcctccagctcaaacccaccttcatcccccaaaccaatctgtatcatgcctgttatcagagaggcacagaaagatgggcagtgcctccgttgtcaccattccccacacccctacacacccccacaccctcccctccaggctccacgacttcacagtcttactgttgtaaatatcattgtacagtttgtaatcctcaaataatcccattgtcagaggcctcgcctgatgggccttctcaccctcgagaaaggccagggaatctagaaggggcaacccttcaaggagagcttcagggtcatctctgtgtgagacactattgtatattcctgtaagattgcatttttatctaaggaatgatgttatttaaaaaacaaacaaaaaacacaaaaaataagaattgcaaataaatttcttaacaatgtct

SEQ ID NO: 43 - protein, 2138 aa, Homo sapiens
  ref <308>: DATABASE ACCESSION NUMBER: NCBI / NP_001161095.1
  ref <309>: DATABASE ENTRY DATE: 2014-05-10
  ref <313>: RELEVANT RESIDUES IN SEQ ID NO: (1)..(2138)
MVNENTRMYIPEENHQGSNYGSPRPAHANMNANAAAGLAPEHIPTPGAALSWQAAIDAARQAKLMGSAGNATISTVSSTQRKRQQYGKPKKQGSTTATRPPRALLCLTLKNPIRRACISIVEWKPFEIIILLTIFANCVALAIYIPFPEDDSNATNSNLERVEYLFLIIFTVEAFLKVIAYGLLFHPNAYLRNGWNLLDFIIVVVGLFSAILEQATKADGANALGGKGAGFDVKALRAFRVLRPLRLVSGVPSLQVVLNSIIKAMVPLLHIALLVLFVIIIYAIIGLELFMGKMHKTCYNQEGIADVPAEDDPSPCALETGHGRQCQNGTVCKPGWDGPKHGITNFDNFAFAMLTVFQCITMEGWTDVLYWMQDAMGYELPWVYFVSLVIFGSFFVLNLVLGVLSGEFSKEREKAKARGDFQKLREKQQLEEDLKGYLDWITQAEDIDPENEDEGMDEEKPRNMSMPTSETESVNTENVAGGDIEGENCGARLAHRISKSKFSRYWRRWNRFCRRKCRAAVKSNVFYWLVIFLVFLNTLTIASEHYNQPNWLTEVQDTANKALLALFTAEMLLKMYSLGLQAYFVSLFNRFDCFVVCGGILETILVETKIMSPLGISVLRCVRLLRIFKITRYWNSLSNLVASLLNSVRSIASLLLLLFLFIIIFSLLGMQLFGGKFNFDEMQTRRSTFDNFPQSLLTVFQILTGEDWNSVMYDGIMAYGGPSFPGMLVCIYFIILFICGNYILLNVFLAIAVDNLADAESLTSAQKEEEEEKERKKLARTASPEKKQELVEKPAVGESKEEKIELKSITADGESPPATKINMDDLQPNENEDKSPYPNPETTGEEDEEEPEMPVGPRPRPLSELHLKEKAVPMPEASAFFIFSSNNRFRLQCHRIVNDTIFTNLILFFILLSSISLAAEDPVQHTSFRNHILFYFDIVFTTIFTIEIALKMTAYGAFLHKGSFCRNYFNILDLLVVSVSLISFGIQSSAINVVKILRVLRVLRPLRAINRAKGLKHVVQCVFVAIRTIGNIVIVTTLLQFMFACIGVQLFKGKLYTCSDSSKQTEAECKGNYITYKDGEVDHPIIQPRSWENSKFDFDNVLAAMMALFTVSTFEGWPELLYRSIDSHTEDKGPIYNYRVEISIFFIIYIIIIAFFMMNIFVGFVIVTFQEQGEQEYKNCELDKNQRQCVEYALKARPLRRYIPKNQHQYKVWYVVNSTYFEYLMFVLILLNTICLAMQHYGQSCLFKIAMNILNMLFTGLFTVEMILKLIAFKPKGYFSDPWNVFDFLIVIGSIIDVILSETNPAEHTQCSPSMNAEENSRISITFFRLFRVMRLVKLLSRGEGIRTLLWTFIKSFQALPYVALLIVMLFFIYAVIGMQVFGKIALNDTTEINRNNNFQTFPQAVLLLFRCATGEAWQDIMLACMPGKKCAPESEPSNSTEGETPCGSSFAVFYFISFYMLCAFLIINLFVAVIMDNFDYLTRDWSILGPHHLDEFKRIWAEYDPEAKGRIKHLDVVTLLRRIQPPLGFGKLCPHRVACKRLVSMNMPLNSDGTVMFNATLFALVRTALRIKTEGNLEQANEELRAIIKKIWKRTSMKLLDQVVPPAGDDEVTVGKFYATFLIQEYFRKFKKRKEQGLVGKPSQRNALSLQAGLRTLHDIGPEIRRAISGDLTAEEELDKAMKEAVSAASEDDIFRRAGGLFGNHVSYYQSDGRSAFPQTFTTQRPLHINKAGSSQGDTESPSHEKLVDSTFTPSSYSSTGSNANINNANNTALGRLPRPAGYPSTVSTVEGHGPPLSPAIRVQEVAWKLSSNRCHSRESQAAMAGQEETSQDETYEVKMNHDTEACSEPSLLSTEMLSYQDDENRQLTLPEEDKRDIRQSPKRGFLRSASLGRRASFHLECLKRQKDRGGDISQKTVLPLHLVHHQALAVAGLSPLLQRSHSPASFPRPFATPPATPGSRGWPPQPVPTLRLEGVESSEKLNSSFPSIHCGSWAETTPGGGGSSAARRVRPVSLMVPSQAGAPGRQFHGSASSLVEAVLISEGLGQFAQDPKFIEVTTQELADACDMTIEEMESAADNILSGGAPQSPNGALLPFVNCRDAGQDRAGGEEDAGCVRARGRPSEEELQDSRVYVSSL

SEQ ID NO: 44 - DNA, 13550 bp, Homo sapiens
  ref <308>: DATABASE ACCESSION NUMBER: NCBI / NM_001167624.2
  ref <309>: DATABASE ENTRY DATE: 2014-05-11
  ref <313>: RELEVANT RESIDUES IN SEQ ID NO: (1)..(13550)
gtgctcagttcttggaaggggcccggatgtactgaggatgcgttacagtttcactcgaggaggcagtagtggaaaggagcagtttttggggtttgatgccataatgggaatcaggtaatcgtcggcggggaagaagaaacgctgcagaccacggcttcctcgaatcttgcgcgaaagccgccggcctcggaggagggattaatccagacccgccggggggtgttttcacatttcttcctcttcgtggctgctcctcctattaaaaccatttttggtccatggtcaatgagaatacgaggatgtacattccagaggaaaaccaccaaggttccaactatgggagcccacgccccgcccatgccaacatgaatgccaatgcggcagcggggctggcccctgagcacatccccaccccgggggctgccctgtcgtggcaggcggccatcgacgcagcccggcaggctaagctgatgggcagcgctggcaatgcgaccatctccacagtcagctccacgcagcggaagcggcagcaatatgggaaacccaagaagcagggcagcaccacggccacacgcccgccccgagccctgctctgcctgaccctgaagaaccccatccggagggcctgcatcagcattgtcgaatggaaaccatttgaaataattattttactgactatttttgccaattgtgtggccttagcgatctatattccctttccagaagatgattccaacgccaccaattccaacctggaacgagtggaatatctctttctcataatttttacggtggaagcgtttttaaaagtaatcgcctatggactcctctttcaccccaatgcctacctccgcaacggctggaacctactagattttataattgtggttgtggggctttttagtgcaattttagaacaagcaaccaaagcagatggggcaaacgctctcggagggaaaggggccggatttgatgtgaaggcgctgagggccttccgcgtgctgcgccccctgcggctggtgtccggagtcccaagtctccaggtggtcctgaattccatcatcaaggccatggtccccctgctgcacatcgccctgcttgtgctgtttgtcatcatcatctacgccatcatcggcttggagctcttcatggggaagatgcacaagacctgctacaaccaggagggcatagcagatgttccagcagaagatgacccttccccttgtgcgctggaaacgggccacgggcggcagtgccagaacggcacggtgtgcaagcccggctgggatggtcccaagcacggcatcaccaactttgacaactttgccttcgccatgctcacggtgttccagtgcatcaccatggagggctggacggacgtgctgtactggatgcaggacgctatgggctatgagttaccctgggtgtattttgtcagtctggtcatctttggatcctttttcgttctaaatctggttctcggtgtgttgagcggagagttttccaaagagagggagaaggccaaggcccggggagatttccagaagctgcgggagaagcagcagctagaagaggatctcaaaggctacctggattggatcactcaggccgaagacatcgatcctgagaatgaggacgaaggcatggatgaggagaagccccgaaacatgagcatgcccaccagtgagaccgagtccgtcaacaccgaaaacgtggctggaggtgacatcgagggagaaaactgcggggccaggctggcccaccggatctccaagtcaaagttcagccgctactggcgccggtggaatcggttctgcagaaggaagtgccgcgccgcagtcaagtctaatgtcttctactggctggtgattttcctggtgttcctcaacacgctcaccattgcctctgagcactacaaccagcccaactggctcacagaagtccaagacacggcaaacaaggccctgctggccctgttcacggcagagatgctcctgaagatgtacagcctgggcctgcaggcctacttcgtgtccctcttcaaccgctttgactgcttcgtcgtgtgtggcggcatcctggagaccatcctggtggagaccaagatcatgtccccactgggcatctccgtgctcagatgcgtccggctgctgaggattttcaagatcacgaggtactggaactccttgagcaacctggtggcatccttgctgaactctgtgcgctccatcgcctccctgctccttctcctcttcctcttcatcatcatcttctccctcctggggatgcagctctttggaggaaagttcaactttgatgagatgcagacccggaggagcacattcgataacttcccccagtccctcctcactgtgtttcagatcctgaccggggaggactggaattcggtgatgtatgatgggatcatggcttatggcggcccctcttttccagggatgttagtctgtatttacttcatcatcctcttcatctgtggaaactatatcctactgaatgtgttcttggccattgctgtggacaacctggctgatgctgagagcctcacatctgcccaaaaggaggaggaagaggagaaggagagaaagaagctggccaggactgccagcccagagaagaaacaagagttggtggagaagccggcagtgggggaatccaaggaggagaagattgagctgaaatccatcacggctgacggagagtctccacccgccaccaagatcaacatggatgacctccagcccaatgaaaatgaggataagagcccctaccccaacccagaaactacaggagaagaggatgaggaggagccagagatgcctgtcggccctcgcccacgaccactctctgagcttcaccttaaggaaaaggcagtgcccatgccagaagccagcgcgtttttcatcttcagctctaacaacaggtttcgcctccagtgccaccgcattgtcaatgacacgatcttcaccaacctgatcctcttcttcattctgctcagcagcatttccctggctgctgaggacccggtccagcacacctccttcaggaaccatattctgttttattttgatattgtttttaccaccattttcaccattgaaattgctctgaagatgactgcttatggggctttcttgcacaagggttctttctgccggaactacttcaacatcctggacctgctggtggtcagcgtgtccctcatctcctttggcatccagtccagtgcaatcaatgtcgtgaagatcttgcgagtcctgcgagtactcaggcccctgagggccatcaacagggccaaggggctaaagcatgtggttcagtgtgtgtttgtcgccatccggaccatcgggaacatcgtgattgtcaccaccctgctgcagttcatgtttgcctgcatcggggtccagctcttcaagggaaagctgtacacctgttcagacagttccaagcagacagaggcggaatgcaagggcaactacatcacgtacaaagacggggaggttgaccaccccatcatccaaccccgcagctgggagaacagcaagtttgactttgacaatgttctggcagccatgatggccctcttcaccgtctccaccttcgaagggtggccagagctgctgtaccgctccatcgactcccacacggaagacaagggccccatctacaactaccgtgtggagatctccatcttcttcatcatctacatcatcatcatcgccttcttcatgatgaacatcttcgtgggcttcgtcatcgtcacctttcaggagcagggggagcaggagtacaagaactgtgagctggacaagaaccagcgacagtgcgtggaatacgccctcaaggcccggcccctgcggaggtacatccccaagaaccagcaccagtacaaagtgtggtacgtggtcaactccacctacttcgagtacctgatgttcgtcctcatcctgctcaacaccatctgcctggccatgcagcactacggccagagctgcctgttcaaaatcgccatgaacatcctcaacatgctcttcactggcctcttcaccgtggagatgatcctgaagctcattgccttcaaacccaagggttactttagtgatccctggaatgtttttgacttcctcatcgtaattggcagcataattgacgtcattctcagtgagactaatccagctgaacatacccaatgctctccctctatgaacgcagaggaaaactcccgcatctccatcaccttcttccgcctgttccgggtcatgcgtctggtgaagctgctgagccgtggggagggcatccggacgctgctgtggaccttcatcaagtccttccaggccctgccctatgtggccctcctgatcgtgatgctgttcttcatctacgcggtgatcgggatgcaggtgtttgggaaaattgccctgaatgataccacagagatcaaccggaacaacaactttcagaccttcccccaggccgtgctgctcctcttcaggtgtgccaccggggaggcctggcaggacatcatgctggcctgcatgccaggcaagaagtgtgccccagagtccgagcccagcaacagcacggagggtgaaacaccctgtggtagcagctttgctgtcttctacttcatcagcttctacatgctctgtgccttcctgatcatcaacctctttgtagctgtcatcatggacaactttgactacctgacaagggactggtccatccttggtccccaccacctggatgagtttaaaagaatctgggcagagtatgaccctgaagccaagggtcgtatcaaacacctggatgtggtgaccctcctccggcggattcagccgccactaggttttgggaagctgtgccctcaccgcgtggcttgcaaacgcctggtctccatgaacatgcctctgaacagcgacgggacagtcatgttcaatgccaccctgtttgccctggtcaggacggccctgaggatcaaaacagaagggaacctagaacaagccaatgaggagctgcgggcgatcatcaagaagatctggaagcggaccagcatgaagctgctggaccaggtggtgccccctgcaggtgatgatgaggtcaccgttggcaagttctacgccacgttcctgatccaggagtacttccggaagttcaagaagcgcaaagagcagggccttgtgggcaagccctcccagaggaacgcgctgtctctgcaggctggcttgcgcacactgcatgacatcgggcctgagatccgacgggccatctctggagatctcaccgctgaggaggagctggacaaggccatgaaggaggctgtgtccgctgcttctgaagatgacatcttcaggagggccggtggcctgttcggcaaccacgtcagctactaccaaagcgacggccggagcgccttcccccagaccttcaccactcagcgcccgctgcacatcaacaaggcgggcagcagccagggcgacactgagtcgccatcccacgagaagctggtggactccaccttcaccccgagcagctactcgtccaccggctccaacgccaacatcaacaacgccaacaacaccgccctgggtcgcctccctcgccccgccggctaccccagcacggtcagcactgtggagggccacgggccccccttgtcccctgccatccgggtgcaggaggtggcgtggaagctcagctccaacagggaaaggcacgttccgatgtgtgaggatctggagctcaggagggattcaggctcagcagggactcaggctcactgccttctgctcaggagagcaaacccctctaggtgccactcccgggagagccaggcagccatggcgggtcaggaggagacgtctcaggatgagacctatgaagtgaagatgaaccatgacacggaggcctgcagtgagcccagcctgctctccacagagatgctctcctaccaggatgacgaaaatcggcaactgacgctcccagaggaggacaagagggacatccggcaatctccgaagaggggtttcctccgctctgcctcactaggtcgaagggcctccttccacctggaatgtctgaagcgacagaaggaccgagggggagacatctctcagaagacagtcctgcccttgcatctggttcatcatcaggcattggcagtggcaggcctgagccccctcctccagagaagccattcccctgcctcattccctaggccttttgccaccccaccagccacacctggcagccgaggctggcccccacagcccgtccccaccctgcggcttgagggggtcgagtccagtgagaaactcaacagcagcttcccatccatccactgcggctcctgggctgagaccacccccggtggcgggggcagcagcgccgcccggagagtccggcccgtctccctcatggtgcccagccaggctggggccccagggaggcagttccacggcagtgccagcagcctggtggaagcggtcttgatttcagaaggactggggcagtttgctcaagatcccaagttcatcgaggtcaccacccaggagctggccgacgcctgcgacatgaccatagaggagatggagagcgcggccgacaacatcctcagcgggggcgccccacagagccccaatggcgccctcttaccctttgtgaactgcagggacgcggggcaggaccgagccgggggcgaagaggacgcgggctgtgtgcgcgcgcggggtcgaccgagtgaggaggagctccaggacagcagggtctacgtcagcagcctgtagtgggcgctgccagatgcgggcttttttttatttgtttcaatgttcctaatgggttcgtttcagaagtgcctcactgttctcgtgacctggagttaaccggaacagcgtcttcattcatttctgttgggaccagacgcggagcctgggtgcgcgagccgccctccgggaggaaggcgcccggctgcgtctgcagaggcggggagaggaggcggcgagggtcccggggcgcgaggaaggcgcctgccctctcccagctcgcaggccccgggcccggccgcgcctccgcggggagagcaccccggcttcccgcgcgccctcaccaaaaggaccctacagcaaacgggtgtctttcgactctgcttgtagaaaccatttgcacatattctgtacgagcctcgctgtctccctagagccagggccctgcggatttggagaagggagcggggcaggacttccaggaggaccccaacccggcccggagagggaggaggaggcctccaggggcgcggagctctggggatgggcgtcgggccggcagtggtgcggctcactccgtccctgcccacctgcgacgggatcccccgaccggcacgggccacgccgagctcccggccagccgccggcccgcaggcagcgcgagggaggagctgcgccgccggctccgcccaaccaggtggtgctgagcttccgctgagcgctcttttgttttgtggtttgacacttttcttgacagcatgttgcagtttcttttcggttttggttttttttaaatgttttattttgctttcccagcgggaggggaggaagaagagtgtttacaaagtcctgtagccccctcacctttctgttttcacttttgccaatgtacatcgggtttggttttcttgtattatttaaacggttgtggtttcctttttccacggaggttcaatagaagccgctgcaggagagttttaccaaccattgtgtatgcccaataatttgttatcatttccttaggtagtaacctatttttgttctggtttggttcggttatctaatggaaaggtaactggcaatgcacttgatgtggtcttgcacatgtgggtgatagagttgggttcctttttatgctgggtgtacaggtgggtttgggagagaggagcatgcgcgagagagtctccgagtgtgtgcgacgcgtgtgtgtgtggtgggttgtctgtgtgcatatgtcctgcccgtgtatatgcacccacaccatgtgcccgtgcacaccagtgactacgcagtcccccctttctggtttagctgtgggaagatctgaatctggggccgtttgaaagcaaaaacaaaccactgtctctgcttctgaaacgggaatcagtaactctttgcattttctgtcccacaagatatgcaaaaacaatgcaataatattcatttaaaaatacaattgtgagttgtgttggcattaaaactgtattttaaaaaaagacagaaatttaagggaaaaacacaagaaggcattttgcttcaatatattccgtgtaatgttttattgcattgataatgtttctgttgaagaaaccgttatacttgaattcaggtcagtttcagtatttttcaaatatttttttaaaactgaattgcaattgtgccaagcgaatataatgaattgaattaagttggttttcggattcacttcttgtatattttgctgcatgtaaagtaaatcattttgtatttggagtgtgacaagctttacctttgaactcaagtgcttttctatatgtggttgggggaaagggaacaagttttctttagtttgcacaatgagcaaaggtatcaccagtgtagtcattattctgctctccacaaacaggtttggacattactgttttgcatatcttgtgtttgcttacatttccctcaatttttccaaaatcgtttgctgggtatgtttgtaccgcctcttgctgtgagagaccaggacctattttattccagtcttcactctgtccactctgctctggtcatctgatttggtacttctccaagaacagcccttcactgtgaggtgcagggaggcgttctgatgagccctcagtcactgggccgtcatccgcatcccccatggaagaggtagctggctttcccttcccttccaccacacggaattttctctttggcttccttaggaaagtgtacactaaccgggaggataaaattaaagtcaggctgcttggagggaggggcatcctcacttccggattcttgttgctctacccaacaaggacagcaggggctcgagaaaggaactggtgaaaccctgatccatctgaaagtcaactctgcgtgctcctttctccatcccttcctcactctggagcagcctttccttcaggcttgccctaatgtttgggctgccggggagggggccaggacaagggaagaggcatccggagctcacagtgggggtgggaacagatttttgtgggggcatctctaatgctcacttatatctccctagaacatcactcttttggtgctgtgtccttcaaatgtatgtcaacagtggtggctgaaaagggactgctttggggaaaacaggacccaaccattcacccagaattgacccattaaatctcttccagtcctagtgttccctgagcccctcttggcacatatataagtaagctagaaattacaataagggacagtccattcctctatgacagcttgctggactgattcatgacaaagtggagaaatgtactcaatactccccggttaacacagtctagaaacagagtttctttatggatatccacacccaagtcatccaaactttcttgattccttttcactgccatcaaggtcctctagaaattgagtttaggtatcatcctttgaaaagttcccaagatttctaccaggaggtacacacaggcgttccctgtctagggcaggaggactatcctagcttgaccttctgatccactagaataagactggcgtatgatgcctgtcatcagaacagactggcacaagtagtgacatcaatgaaccacagcacaatcttccaagtgatgtctactctccacctaaaatggaattttccccatgaccttgtaaaacataattgtcacatcttccatacccctcctgacagcccccaagtgtcaggagaaaacagtcaggggctaagggcccaagggacttgaagaaacaacagtttaaggtctgcagtttggtcaacttaattcttgtcctccgaccagccctgcctctttcatttccagaccttggagaatttttcccagctttgattcagaaggtactagttataacccctttccttcttcttaatccaataggcctcactctcactgggaaatccactcaaaggaacaaggcaatgtctctcattctatttcccagttccaaattccaggtgcttgtctggagtgaagctacccgttactttctcccagcttttctccacccagcatgtctcctgcccatgcagctgaagacagtggggcaacctcaggagaagcagacctttccatgcccaagttcatctcctgagcaacagtgacacctagaaaatgaggactttggaagtcacccaaaagatggtggctactttatggagtcctgaagatacacagccaccactcctaaaggcaaagaaagaaaacacgaatgtaggtcagggatagagtggaaccctggtcatcggggtttttagcctcatcgtgggaaaggtggtaaaggaggatgatggcatctccatccctagaggccaagaattgaaatatcattgtcaaggattagaaacaattcagcaaagaggccacaaaaagggcctgctgactcccagaagacctctttaaaccccaggggaggcaaatacttgctgatggagtctgggccgtttccatattttaaagaagacctgcctctggggcaaatgtcagcacagagaggactgggaggagaatggaggcaagaaaagggcatattttgactccctctgtgcctcttcccagttcatggaaggatgtgttcagcttacccacccacagtgaccagtgtggtggagccgctgacatctcaaggatctatttgggaaggtgagaagagtactcattccatctgggggtgttgttccagccacatcagcctacctggtgggatgtgggggtgtctgccaccctgtcccccctctgctgatgtccctcccctcaggctgtccaggtgccacctgacacaggctgctgtgcaaagacaggcggggaagcccaaacctcactcccagggaggccctcagccgccagagtccaggttctccagaggctacgatttgaggaggttgagggggaagacaggagggaaagaaaagtcctacaactgtcaggaatggggcacctttccctgtccctaagcaaagctccctcttcccactgccctccccagccccagctccctgtcctccccaacacctagtgagaaagacggtgcgtggaagggagtcccatgggcagatgcttacacgacctctttgtgaagcctcttctgggtttaacttcattcatcaatttattcttatgtcaaagcaatgaaacttttctttctggagccagataccaatacaacaggtgaacgggtttctgccacatctctacattgacgggggatgcttgaacaacccccctcactacacagacacacaccgttaaggcacaagggctggggttgagctctagatgagggactttcctgctcctgcaagggtgagcactgtatacacagacaaggagggtgcagtagagtgactcccttggatggaagtagtaccatcagaacctactattattatgacataaattctatttacatacattgagagaatactacaatcaacactttttcctgggatgactttaagaggtttgagccacagcacctgaagtggcaaagatccatggtctttgtagggtattagagaactcttccagtcacctctgaaagcactctagatcttgcagctgagtggatgaagtgtaacaaatctgttgcacgctgagaggagtcagaattagcatttttcatgaaagttccccacgtctctactaagaatgaggaagaaaagactaagactaggtaattacacagaggcttgaaatgttacatcaccagagccaagtcctctcccttcagatcagttactggctgctacacagggacacccccaccttttcagggcatcccatgcactccacttctcaggatctaaggaatttgactttgtagggatcccagaaagggcactgtgccacttcccctggtgtgaatcagacatacattgtacattcatttctaaaattcactcatgcacctcaaaccaaggtcattatccaaaaaaaaaaaaaaaaagctctgggtggaagagtttgtaagttttaagagagggtcatttctatgtgaggaaatgcagaaatggacagaatgattcttattcactgtttgggtctggagaattcccattgtggaaatcttagagatctcaagtttattaccaagggaataaggaaaaaaaggtgagcaggcaccaggccaagcagtggctcccttgccaaggaacctgaggctgcaggtttcagggacccccttgaagaaacctctcctggccattggccaggagaaaagagaagtctctcctgtagagtcacaagagaagcaaaagagggtgggtcactgggtcctggacatagcccccaaccccaagacttcccaatatggagaaactacaccaatgtttaaaaggggaaaaggaaagaacttgtacatcaagggaagatgatttgtaaacacacagtcctgtgcagaaagatccccttcaggaggtgtctccagcatcccaaagctgtgcgcaccttctcttttcctgcctcaggccacctatgcatccagctgcagcccatacccacacctgaaatccatctcttgaatcccagccaggttatataccaccccattgccatgtcctgtcctggccagaatgcatgctgttcccccaagcctcgtgggagtgaggccatgggaaacagagatgagcatgtctggacaagtctgtgatggtagtggatgagaataacccatggcaaaacacgcacattcattaagaaatagggcgacagattccccgttggtgaagcactgaaaggtctattactctcataatattgctgttttattttaatccaccagagctaccatgcaaaactttcctcctgtgaaacgctccagataaagctcctctaatctccccttccctcatgtcctccagctcaaacccaccttcatcccccaaaccaatctgtatcatgcctgttatcagagaggcacagaaagatgggcagtgcctccgttgtcaccattccccacacccctacacacccccacaccctcccctccaggctccacgacttcacagtcttactgttgtaaatatcattgtacagtttgtaatcctcaaataatcccattgtcagaggcctcgcctgatgggccttctcaccctcgagaaaggccagggaatctagaaggggcaacccttcaaggagagcttcagggtcatctctgtgtgagacactattgtatattcctgtaagattgcatttttatctaaggaatgatgttatttaaaaaacaaacaaaaaacacaaaaaataagaattgcaaataaatttcttaacaatgtct

SEQ ID NO: 45 - protein, 2173 aa, Homo sapiens
  ref <308>: DATABASE ACCESSION NUMBER: NCBI / NP_001161096.2
  ref <309>: DATABASE ENTRY DATE: 2014-05-11
  ref <313>: RELEVANT RESIDUES IN SEQ ID NO: (1)..(2173)
MVNENTRMYIPEENHQGSNYGSPRPAHANMNANAAAGLAPEHIPTPGAALSWQAAIDAARQAKLMGSAGNATISTVSSTQRKRQQYGKPKKQGSTTATRPPRALLCLTLKNPIRRACISIVEWKPFEIIILLTIFANCVALAIYIPFPEDDSNATNSNLERVEYLFLIIFTVEAFLKVIAYGLLFHPNAYLRNGWNLLDFIIVVVGLFSAILEQATKADGANALGGKGAGFDVKALRAFRVLRPLRLVSGVPSLQVVLNSIIKAMVPLLHIALLVLFVIIIYAIIGLELFMGKMHKTCYNQEGIADVPAEDDPSPCALETGHGRQCQNGTVCKPGWDGPKHGITNFDNFAFAMLTVFQCITMEGWTDVLYWMQDAMGYELPWVYFVSLVIFGSFFVLNLVLGVLSGEFSKEREKAKARGDFQKLREKQQLEEDLKGYLDWITQAEDIDPENEDEGMDEEKPRNMSMPTSETESVNTENVAGGDIEGENCGARLAHRISKSKFSRYWRRWNRFCRRKCRAAVKSNVFYWLVIFLVFLNTLTIASEHYNQPNWLTEVQDTANKALLALFTAEMLLKMYSLGLQAYFVSLFNRFDCFVVCGGILETILVETKIMSPLGISVLRCVRLLRIFKITRYWNSLSNLVASLLNSVRSIASLLLLLFLFIIIFSLLGMQLFGGKFNFDEMQTRRSTFDNFPQSLLTVFQILTGEDWNSVMYDGIMAYGGPSFPGMLVCIYFIILFICGNYILLNVFLAIAVDNLADAESLTSAQKEEEEEKERKKLARTASPEKKQELVEKPAVGESKEEKIELKSITADGESPPATKINMDDLQPNENEDKSPYPNPETTGEEDEEEPEMPVGPRPRPLSELHLKEKAVPMPEASAFFIFSSNNRFRLQCHRIVNDTIFTNLILFFILLSSISLAAEDPVQHTSFRNHILFYFDIVFTTIFTIEIALKMTAYGAFLHKGSFCRNYFNILDLLVVSVSLISFGIQSSAINVVKILRVLRVLRPLRAINRAKGLKHVVQCVFVAIRTIGNIVIVTTLLQFMFACIGVQLFKGKLYTCSDSSKQTEAECKGNYITYKDGEVDHPIIQPRSWENSKFDFDNVLAAMMALFTVSTFEGWPELLYRSIDSHTEDKGPIYNYRVEISIFFIIYIIIIAFFMMNIFVGFVIVTFQEQGEQEYKNCELDKNQRQCVEYALKARPLRRYIPKNQHQYKVWYVVNSTYFEYLMFVLILLNTICLAMQHYGQSCLFKIAMNILNMLFTGLFTVEMILKLIAFKPKGYFSDPWNVFDFLIVIGSIIDVILSETNPAEHTQCSPSMNAEENSRISITFFRLFRVMRLVKLLSRGEGIRTLLWTFIKSFQALPYVALLIVMLFFIYAVIGMQVFGKIALNDTTEINRNNNFQTFPQAVLLLFRCATGEAWQDIMLACMPGKKCAPESEPSNSTEGETPCGSSFAVFYFISFYMLCAFLIINLFVAVIMDNFDYLTRDWSILGPHHLDEFKRIWAEYDPEAKGRIKHLDVVTLLRRIQPPLGFGKLCPHRVACKRLVSMNMPLNSDGTVMFNATLFALVRTALRIKTEGNLEQANEELRAIIKKIWKRTSMKLLDQVVPPAGDDEVTVGKFYATFLIQEYFRKFKKRKEQGLVGKPSQRNALSLQAGLRTLHDIGPEIRRAISGDLTAEEELDKAMKEAVSAASEDDIFRRAGGLFGNHVSYYQSDGRSAFPQTFTTQRPLHINKAGSSQGDTESPSHEKLVDSTFTPSSYSSTGSNANINNANNTALGRLPRPAGYPSTVSTVEGHGPPLSPAIRVQEVAWKLSSNRERHVPMCEDLELRRDSGSAGTQAHCLLLRRANPSRCHSRESQAAMAGQEETSQDETYEVKMNHDTEACSEPSLLSTEMLSYQDDENRQLTLPEEDKRDIRQSPKRGFLRSASLGRRASFHLECLKRQKDRGGDISQKTVLPLHLVHHQALAVAGLSPLLQRSHSPASFPRPFATPPATPGSRGWPPQPVPTLRLEGVESSEKLNSSFPSIHCGSWAETTPGGGGSSAARRVRPVSLMVPSQAGAPGRQFHGSASSLVEAVLISEGLGQFAQDPKFIEVTTQELADACDMTIEEMESAADNILSGGAPQSPNGALLPFVNCRDAGQDRAGGEEDAGCVRARGRPSEEELQDSRVYVSSL

SEQ ID NO: 46 - DNA, 13660 bp, Homo sapiens
  ref <308>: DATABASE ACCESSION NUMBER: NCBI / NM_001167625.1
  ref <309>: DATABASE ENTRY DATE: 2014-05-05
  ref <313>: RELEVANT RESIDUES IN SEQ ID NO: (1)..(13660)
ttattttttcaaatggtgtagccgccggaggtgcggtgctcagttcttggaaggggcccggatgtactgaggatgcgttacagtttcactcgaggaggcagtagtggaaaggagcagtttttggggtttgatgccataatgggaatcaggtaatcgtcggcggggaagaagaaacgctgcagaccacggcttcctcgaatcttgcgcgaaagccgccggcctcggaggagggattaatccagacccgccggggggtgttttcacatttcttcctcttcgtggctgctcctcctattaaaaccatttttggtccatggtcaatgagaatacgaggatgtacattccagaggaaaaccaccaaggttccaactatgggagcccacgccccgcccatgccaacatgaatgccaatgcggcagcggggctggcccctgagcacatccccaccccgggggctgccctgtcgtggcaggcggccatcgacgcagcccggcaggctaagctgatgggcagcgctggcaatgcgaccatctccacagtcagctccacgcagcggaagcggcagcaatatgggaaacccaagaagcagggcagcaccacggccacacgcccgccccgagccctgctctgcctgaccctgaagaaccccatccggagggcctgcatcagcattgtcgaatggaaaccatttgaaataattattttactgactatttttgccaattgtgtggccttagcgatctatattccctttccagaagatgattccaacgccaccaattccaacctggaacgagtggaatatctctttctcataatttttacggtggaagcgtttttaaaagtaatcgcctatggactcctctttcaccccaatgcctacctccgcaacggctggaacctactagattttataattgtggttgtggggctttttagtgcaattttagaacaagcaaccaaagcagatggggcaaacgctctcggagggaaaggggccggatttgatgtgaaggcgctgagggccttccgcgtgctgcgccccctgcggctggtgtccggagtcccaagtctccaggtggtcctgaattccatcatcaaggccatggtccccctgctgcacatcgccctgcttgtgctgtttgtcatcatcatctacgccatcatcggcttggagctcttcatggggaagatgcacaagacctgctacaaccaggagggcatagcagatgttccagcagaagatgacccttccccttgtgcgctggaaacgggccacgggcggcagtgccagaacggcacggtgtgcaagcccggctgggatggtcccaagcacggcatcaccaactttgacaactttgccttcgccatgctcacggtgttccagtgcatcaccatggagggctggacggacgtgctgtactggatgcaggacgctatgggctatgagttaccctgggtgtattttgtcagtctggtcatctttggatcctttttcgttctaaatctggttctcggtgtgttgagcggagagttttccaaagagagggagaaggccaaggcccggggagatttccagaagctgcgggagaagcagcagctagaagaggatctcaaaggctacctggattggatcactcaggccgaagacatcgatcctgagaatgaggacgaaggcatggatgaggagaagccccgaaacatgagcatgcccaccagtgagaccgagtccgtcaacaccgaaaacgtggctggaggtgacatcgagggagaaaactgcggggccaggctggcccaccggatctccaagtcaaagttcagccgctactggcgccggtggaatcggttctgcagaaggaagtgccgcgccgcagtcaagtctaatgtcttctactggctggtgattttcctggtgttcctcaacacgctcaccattgcctctgagcactacaaccagcccaactggctcacagaagtccaagacacggcaaacaaggccctgctggccctgttcacggcagagatgctcctgaagatgtacagcctgggcctgcaggcctacttcgtgtccctcttcaaccgctttgactgcttcgtcgtgtgtggcggcatcctggagaccatcctggtggagaccaagatcatgtccccactgggcatctccgtgctcagatgcgtccggctgctgaggattttcaagatcacgaggtactggaactccttgagcaacctggtggcatccttgctgaactctgtgcgctccatcgcctccctgctccttctcctcttcctcttcatcatcatcttctccctcctggggatgcagctctttggaggaaagttcaactttgatgagatgcagacccggaggagcacattcgataacttcccccagtccctcctcactgtgtttcagatcctgaccggggaggactggaattcggtgatgtatgatgggatcatggcttatggcggcccctcttttccagggatgttagtctgtatttacttcatcatcctcttcatctgtggaaactatatcctactgaatgtgttcttggccattgctgtggacaacctggctgatgctgagagcctcacatctgcccaaaaggaggaggaagaggagaaggagagaaagaagctggccaggactgccagcccagagaagaaacaagagttggtggagaagccggcagtgggggaatccaaggaggagaagattgagctgaaatccatcacggctgacggagagtctccacccgccaccaagatcaacatggatgacctccagcccaatgaaaatgaggataagagcccctaccccaacccagaaactacaggagaagaggatgaggaggagccagagatgcctgtcggccctcgcccacgaccactctctgagcttcaccttaaggaaaaggcagtgcccatgccagaagccagcgcgtttttcatcttcagctctaacaacaggtttcgcctccagtgccaccgcattgtcaatgacacgatcttcaccaacctgatcctcttcttcattctgctcagcagcatttccctggctgctgaggacccggtccagcacacctccttcaggaaccatattctgttttattttgatattgtttttaccaccattttcaccattgaaattgctctgaagatgactgcttatggggctttcttgcacaagggttctttctgccggaactacttcaacatcctggacctgctggtggtcagcgtgtccctcatctcctttggcatccagtccagtgcaatcaatgtcgtgaagatcttgcgagtcctgcgagtactcaggcccctgagggccatcaacagggccaaggggctaaagcatgtggttcagtgtgtgtttgtcgccatccggaccatcgggaacatcgtgattgtcaccaccctgctgcagttcatgtttgcctgcatcggggtccagctcttcaagggaaagctgtacacctgttcagacagttccaagcagacagaggcggaatgcaagggcaactacatcacgtacaaagacggggaggttgaccaccccatcatccaaccccgcagctgggagaacagcaagtttgactttgacaatgttctggcagccatgatggccctcttcaccgtctccaccttcgaagggtggccagagctgctgtaccgctccatcgactcccacacggaagacaagggccccatctacaactaccgtgtggagatctccatcttcttcatcatctacatcatcatcatcgccttcttcatgatgaacatcttcgtgggcttcgtcatcgtcacctttcaggagcagggggagcaggagtacaagaactgtgagctggacaagaaccagcgacagtgcgtggaatacgccctcaaggcccggcccctgcggaggtacatccccaagaaccagcaccagtacaaagtgtggtacgtggtcaactccacctacttcgagtacctgatgttcgtcctcatcctgctcaacaccatctgcctggccatgcagcactacggccagagctgcctgttcaaaatcgccatgaacatcctcaacatgctcttcactggcctcttcaccgtggagatgatcctgaagctcattgccttcaaacccaagcactatttctgtgatgcatggaatacatttgacgccttgattgttgtgggtagcattgttgatatagcaatcaccgaggtaaacaacgcagaggaaaactcccgcatctccatcaccttcttccgcctgttccgggtcatgcgtctggtgaagctgctgagccgtggggagggcatccggacgctgctgtggaccttcatcaagtccttccaggccctgccctatgtggccctcctgatcgtgatgctgttcttcatctacgcggtgatcgggatgcaggtgtttgggaaaattgccctgaatgataccacagagatcaaccggaacaacaactttcagaccttcccccaggccgtgctgctcctcttcaggtgtgccaccggggaggcctggcaggacatcatgctggcctgcatgccaggcaagaagtgtgccccagagtccgagcccagcaacagcacggagggtgaaacaccctgtggtagcagctttgctgtcttctacttcatcagcttctacatgctctgtgccttcctgatcatcaacctctttgtagctgtcatcatggacaactttgactacctgacaagggactggtccatccttggtccccaccacctggatgagtttaaaagaatctgggcagagtatgaccctgaagccaagggtcgtatcaaacacctggatgtggtgaccctcctccggcggattcagccgccactaggttttgggaagctgtgccctcaccgcgtggcttgcaaacgcctggtctccatgaacatgcctctgaacagcgacgggacagtcatgttcaatgccaccctgtttgccctggtcaggacggccctgaggatcaaaacagaagggaacctagaacaagccaatgaggagctgcgggcgatcatcaagaagatctggaagcggaccagcatgaagctgctggaccaggtggtgccccctgcaggtgatgatgaggtcaccgttggcaagttctacgccacgttcctgatccaggagtacttccggaagttcaagaagcgcaaagagcagggccttgtgggcaagccctcccagaggaacgcgctgtctctgcaggctggcttgcgcacactgcatgacatcgggcctgagatccgacgggccatctctggagatctcaccgctgaggaggagctggacaaggccatgaaggaggctgtgtccgctgcttctgaagatgacatcttcaggagggccggtggcctgttcggcaaccacgtcagctactaccaaagcgacggccggagcgccttcccccagaccttcaccactcagcgcccgctgcacatcaacaaggcgggcagcagccagggcgacactgagtcgccatcccacgagaagctggtggactccaccttcaccccgagcagctactcgtccaccggctccaacgccaacatcaacaacgccaacaacaccgccctgggtcgcctccctcgccccgccggctaccccagcacggtcagcactgtggagggccacgggccccccttgtcccctgccatccgggtgcaggaggtggcgtggaagctcagctccaacaggatgcactgctgtgacatgctggatggtgggaccttccctcccgccctgggcccccgcagggctcctccctgtctgcatcagcagctccagggttccctggcggggctgagagaggacacaccctgcatcgtgcctggccacgcttcactgtgctgctcttccagagtaggagagtggctcccagcaggctgcacagccccccagcatgccaggtgccactcccgggagagccaggcagccatggcgggtcaggaggagacgtctcaggatgagacctatgaagtgaagatgaaccatgacacggaggcctgcagtgagcccagcctgctctccacagagatgctctcctaccaggatgacgaaaatcggcaactgacgctcccagaggaggacaagagggacatccggcaatctccgaagaggggtttcctccgctctgcctcactaggtcgaagggcctccttccacctggaatgtctgaagcgacagaaggaccgagggggagacatctctcagaagacagtcctgcccttgcatctggttcatcatcaggcattggcagtggcaggcctgagccccctcctccagagaagccattcccctgcctcattccctaggccttttgccaccccaccagccacacctggcagccgaggctggcccccacagcccgtccccaccctgcggcttgagggggtcgagtccagtgagaaactcaacagcagcttcccatccatccactgcggctcctgggctgagaccacccccggtggcgggggcagcagcgccgcccggagagtccggcccgtctccctcatggtgcccagccaggctggggccccagggaggcagttccacggcagtgccagcagcctggtggaagcggtcttgatttcagaaggactggggcagtttgctcaagatcccaagttcatcgaggtcaccacccaggagctggccgacgcctgcgacatgaccatagaggagatggagagcgcggccgacaacatcctcagcgggggcgccccacagagccccaatggcgccctcttaccctttgtgaactgcagggacgcggggcaggaccgagccgggggcgaagaggacgcgggctgtgtgcgcgcgcggggtcgaccgagtgaggaggagctccaggacagcagggtctacgtcagcagcctgtagtgggcgctgccagatgcgggcttttttttatttgtttcaatgttcctaatgggttcgtttcagaagtgcctcactgttctcgtgacctggagttaaccggaacagcgtcttcattcatttctgttgggaccagacgcggagcctgggtgcgcgagccgccctccgggaggaaggcgcccggctgcgtctgcagaggcggggagaggaggcggcgagggtcccggggcgcgaggaaggcgcctgccctctcccagctcgcaggccccgggcccggccgcgcctccgcggggagagcaccccggcttcccgcgcgccctcaccaaaaggaccctacagcaaacgggtgtctttcgactctgcttgtagaaaccatttgcacatattctgtacgagcctcgctgtctccctagagccagggccctgcggatttggagaagggagcggggcaggacttccaggaggaccccaacccggcccggagagggaggaggaggcctccaggggcgcggagctctggggatgggcgtcgggccggcagtggtgcggctcactccgtccctgcccacctgcgacgggatcccccgaccggcacgggccacgccgagctcccggccagccgccggcccgcaggcagcgcgagggaggagctgcgccgccggctccgcccaaccaggtggtgctgagcttccgctgagcgctcttttgttttgtggtttgacacttttcttgacagcatgttgcagtttcttttcggttttggttttttttaaatgttttattttgctttcccagcgggaggggaggaagaagagtgtttacaaagtcctgtagccccctcacctttctgttttcacttttgccaatgtacatcgggtttggttttcttgtattatttaaacggttgtggtttcctttttccacggaggttcaatagaagccgctgcaggagagttttaccaaccattgtgtatgcccaataatttgttatcatttccttaggtagtaacctatttttgttctggtttggttcggttatctaatggaaaggtaactggcaatgcacttgatgtggtcttgcacatgtgggtgatagagttgggttcctttttatgctgggtgtacaggtgggtttgggagagaggagcatgcgcgagagagtctccgagtgtgtgcgacgcgtgtgtgtgtggtgggttgtctgtgtgcatatgtcctgcccgtgtatatgcacccacaccatgtgcccgtgcacaccagtgactacgcagtcccccctttctggtttagctgtgggaagatctgaatctggggccgtttgaaagcaaaaacaaaccactgtctctgcttctgaaacgggaatcagtaactctttgcattttctgtcccacaagatatgcaaaaacaatgcaataatattcatttaaaaatacaattgtgagttgtgttggcattaaaactgtattttaaaaaaagacagaaatttaagggaaaaacacaagaaggcattttgcttcaatatattccgtgtaatgttttattgcattgataatgtttctgttgaagaaaccgttatacttgaattcaggtcagtttcagtatttttcaaatatttttttaaaactgaattgcaattgtgccaagcgaatataatgaattgaattaagttggttttcggattcacttcttgtatattttgctgcatgtaaagtaaatcattttgtatttggagtgtgacaagctttacctttgaactcaagtgcttttctatatgtggttgggggaaagggaacaagttttctttagtttgcacaatgagcaaaggtatcaccagtgtagtcattattctgctctccacaaacaggtttggacattactgttttgcatatcttgtgtttgcttacatttccctcaatttttccaaaatcgtttgctgggtatgtttgtaccgcctcttgctgtgagagaccaggacctattttattccagtcttcactctgtccactctgctctggtcatctgatttggtacttctccaagaacagcccttcactgtgaggtgcagggaggcgttctgatgagccctcagtcactgggccgtcatccgcatcccccatggaagaggtagctggctttcccttcccttccaccacacggaattttctctttggcttccttaggaaagtgtacactaaccgggaggataaaattaaagtcaggctgcttggagggaggggcatcctcacttccggattcttgttgctctacccaacaaggacagcaggggctcgagaaaggaactggtgaaaccctgatccatctgaaagtcaactctgcgtgctcctttctccatcccttcctcactctggagcagcctttccttcaggcttgccctaatgtttgggctgccggggagggggccaggacaagggaagaggcatccggagctcacagtgggggtgggaacagatttttgtgggggcatctctaatgctcacttatatctccctagaacatcactcttttggtgctgtgtccttcaaatgtatgtcaacagtggtggctgaaaagggactgctttggggaaaacaggacccaaccattcacccagaattgacccattaaatctcttccagtcctagtgttccctgagcccctcttggcacatatataagtaagctagaaattacaataagggacagtccattcctctatgacagcttgctggactgattcatgacaaagtggagaaatgtactcaatactccccggttaacacagtctagaaacagagtttctttatggatatccacacccaagtcatccaaactttcttgattccttttcactgccatcaaggtcctctagaaattgagtttaggtatcatcctttgaaaagttcccaagatttctaccaggaggtacacacaggcgttccctgtctagggcaggaggactatcctagcttgaccttctgatccactagaataagactggcgtatgatgcctgtcatcagaacagactggcacaagtagtgacatcaatgaaccacagcacaatcttccaagtgatgtctactctccacctaaaatggaattttccccatgaccttgtaaaacataattgtcacatcttccatacccctcctgacagcccccaagtgtcaggagaaaacagtcaggggctaagggcccaagggacttgaagaaacaacagtttaaggtctgcagtttggtcaacttaattcttgtcctccgaccagccctgcctctttcatttccagaccttggagaatttttcccagctttgattcagaaggtactagttataacccctttccttcttcttaatccaataggcctcactctcactgggaaatccactcaaaggaacaaggcaatgtctctcattctatttcccagttccaaattccaggtgcttgtctggagtgaagctacccgttactttctcccagcttttctccacccagcatgtctcctgcccatgcagctgaagacagtggggcaacctcaggagaagcagacctttccatgcccaagttcatctcctgagcaacagtgacacctagaaaatgaggactttggaagtcacccaaaagatggtggctactttatggagtcctgaagatacacagccaccactcctaaaggcaaagaaagaaaacacgaatgtaggtcagggatagagtggaaccctggtcatcggggtttttagcctcatcgtgggaaaggtggtaaaggaggatgatggcatctccatccctagaggccaagaattgaaatatcattgtcaaggattagaaacaattcagcaaagaggccacaaaaagggcctgctgactcccagaagacctctttaaaccccaggggaggcaaatacttgctgatggagtctgggccgtttccatattttaaagaagacctgcctctggggcaaatgtcagcacagagaggactgggaggagaatggaggcaagaaaagggcatattttgactccctctgtgcctcttcccagttcatggaaggatgtgttcagcttacccacccacagtgaccagtgtggtggagccgctgacatctcaaggatctatttgggaaggtgagaagagtactcattccatctgggggtgttgttccagccacatcagcctacctggtgggatgtgggggtgtctgccaccctgtcccccctctgctgatgtccctcccctcaggctgtccaggtgccacctgacacaggctgctgtgcaaagacaggcggggaagcccaaacctcactcccagggaggccctcagccgccagagtccaggttctccagaggctacgatttgaggaggttgagggggaagacaggagggaaagaaaagtcctacaactgtcaggaatggggcacctttccctgtccctaagcaaagctccctcttcccactgccctccccagccccagctccctgtcctccccaacacctagtgagaaagacggtgcgtggaagggagtcccatgggcagatgcttacacgacctctttgtgaagcctcttctgggtttaacttcattcatcaatttattcttatgtcaaagcaatgaaacttttctttctggagccagataccaatacaacaggtgaacgggtttctgccacatctctacattgacgggggatgcttgaacaacccccctcactacacagacacacaccgttaaggcacaagggctggggttgagctctagatgagggactttcctgctcctgcaagggtgagcactgtatacacagacaaggagggtgcagtagagtgactcccttggatggaagtagtaccatcagaacctactattattatgacataaattctatttacatacattgagagaatactacaatcaacactttttcctgggatgactttaagaggtttgagccacagcacctgaagtggcaaagatccatggtctttgtagggtattagagaactcttccagtcacctctgaaagcactctagatcttgcagctgagtggatgaagtgtaacaaatctgttgcacgctgagaggagtcagaattagcatttttcatgaaagttccccacgtctctactaagaatgaggaagaaaagactaagactaggtaattacacagaggcttgaaatgttacatcaccagagccaagtcctctcccttcagatcagttactggctgctacacagggacacccccaccttttcagggcatcccatgcactccacttctcaggatctaaggaatttgactttgtagggatcccagaaagggcactgtgccacttcccctggtgtgaatcagacatacattgtacattcatttctaaaattcactcatgcacctcaaaccaaggtcattatccaaaaaaaaaaaaaaaaagctctgggtggaagagtttgtaagttttaagagagggtcatttctatgtgaggaaatgcagaaatggacagaatgattcttattcactgtttgggtctggagaattcccattgtggaaatcttagagatctcaagtttattaccaagggaataaggaaaaaaaggtgagcaggcaccaggccaagcagtggctcccttgccaaggaacctgaggctgcaggtttcagggacccccttgaagaaacctctcctggccattggccaggagaaaagagaagtctctcctgtagagtcacaagagaagcaaaagagggtgggtcactgggtcctggacatagcccccaaccccaagacttcccaatatggagaaactacaccaatgtttaaaaggggaaaaggaaagaacttgtacatcaagggaagatgatttgtaaacacacagtcctgtgcagaaagatccccttcaggaggtgtctccagcatcccaaagctgtgcgcaccttctcttttcctgcctcaggccacctatgcatccagctgcagcccatacccacacctgaaatccatctcttgaatcccagccaggttatataccaccccattgccatgtcctgtcctggccagaatgcatgctgttcccccaagcctcgtgggagtgaggccatgggaaacagagatgagcatgtctggacaagtctgtgatggtagtggatgagaataacccatggcaaaacacgcacattcattaagaaatagggcgacagattccccgttggtgaagcactgaaaggtctattactctcataatattgctgttttattttaatccaccagagctaccatgcaaaactttcctcctgtgaaacgctccagataaagctcctctaatctccccttccctcatgtcctccagctcaaacccaccttcatcccccaaaccaatctgtatcatgcctgttatcagagaggcacagaaagatgggcagtgcctccgttgtcaccattccccacacccctacacacccccacaccctcccctccaggctccacgacttcacagtcttactgttgtaaatatcattgtacagtttgtaatcctcaaataatcccattgtcagaggcctcgcctgatgggccttctcaccctcgagaaaggccagggaatctagaaggggcaacccttcaaggagagcttcagggtcatctctgtgtgagacactattgtatattcctgtaagattgcatttttatctaaggaatgatgttatttaaaaaacaaacaaaaaacacaaaaaataagaattgcaaataaatttcttaacaatgtct

SEQ ID NO: 47 - protein, 2198 aa, Homo sapiens
  ref <308>: DATABASE ACCESSION NUMBER: NCBI / NP_001161097.1
  ref <309>: DATABASE ENTRY DATE: 2014-05-05
  ref <313>: RELEVANT RESIDUES IN SEQ ID NO: (1)..(2198)
MVNENTRMYIPEENHQGSNYGSPRPAHANMNANAAAGLAPEHIPTPGAALSWQAAIDAARQAKLMGSAGNATISTVSSTQRKRQQYGKPKKQGSTTATRPPRALLCLTLKNPIRRACISIVEWKPFEIIILLTIFANCVALAIYIPFPEDDSNATNSNLERVEYLFLIIFTVEAFLKVIAYGLLFHPNAYLRNGWNLLDFIIVVVGLFSAILEQATKADGANALGGKGAGFDVKALRAFRVLRPLRLVSGVPSLQVVLNSIIKAMVPLLHIALLVLFVIIIYAIIGLELFMGKMHKTCYNQEGIADVPAEDDPSPCALETGHGRQCQNGTVCKPGWDGPKHGITNFDNFAFAMLTVFQCITMEGWTDVLYWMQDAMGYELPWVYFVSLVIFGSFFVLNLVLGVLSGEFSKEREKAKARGDFQKLREKQQLEEDLKGYLDWITQAEDIDPENEDEGMDEEKPRNMSMPTSETESVNTENVAGGDIEGENCGARLAHRISKSKFSRYWRRWNRFCRRKCRAAVKSNVFYWLVIFLVFLNTLTIASEHYNQPNWLTEVQDTANKALLALFTAEMLLKMYSLGLQAYFVSLFNRFDCFVVCGGILETILVETKIMSPLGISVLRCVRLLRIFKITRYWNSLSNLVASLLNSVRSIASLLLLLFLFIIIFSLLGMQLFGGKFNFDEMQTRRSTFDNFPQSLLTVFQILTGEDWNSVMYDGIMAYGGPSFPGMLVCIYFIILFICGNYILLNVFLAIAVDNLADAESLTSAQKEEEEEKERKKLARTASPEKKQELVEKPAVGESKEEKIELKSITADGESPPATKINMDDLQPNENEDKSPYPNPETTGEEDEEEPEMPVGPRPRPLSELHLKEKAVPMPEASAFFIFSSNNRFRLQCHRIVNDTIFTNLILFFILLSSISLAAEDPVQHTSFRNHILFYFDIVFTTIFTIEIALKMTAYGAFLHKGSFCRNYFNILDLLVVSVSLISFGIQSSAINVVKILRVLRVLRPLRAINRAKGLKHVVQCVFVAIRTIGNIVIVTTLLQFMFACIGVQLFKGKLYTCSDSSKQTEAECKGNYITYKDGEVDHPIIQPRSWENSKFDFDNVLAAMMALFTVSTFEGWPELLYRSIDSHTEDKGPIYNYRVEISIFFIIYIIIIAFFMMNIFVGFVIVTFQEQGEQEYKNCELDKNQRQCVEYALKARPLRRYIPKNQHQYKVWYVVNSTYFEYLMFVLILLNTICLAMQHYGQSCLFKIAMNILNMLFTGLFTVEMILKLIAFKPKHYFCDAWNTFDALIVVGSIVDIAITEVNNAEENSRISITFFRLFRVMRLVKLLSRGEGIRTLLWTFIKSFQALPYVALLIVMLFFIYAVIGMQVFGKIALNDTTEINRNNNFQTFPQAVLLLFRCATGEAWQDIMLACMPGKKCAPESEPSNSTEGETPCGSSFAVFYFISFYMLCAFLIINLFVAVIMDNFDYLTRDWSILGPHHLDEFKRIWAEYDPEAKGRIKHLDVVTLLRRIQPPLGFGKLCPHRVACKRLVSMNMPLNSDGTVMFNATLFALVRTALRIKTEGNLEQANEELRAIIKKIWKRTSMKLLDQVVPPAGDDEVTVGKFYATFLIQEYFRKFKKRKEQGLVGKPSQRNALSLQAGLRTLHDIGPEIRRAISGDLTAEEELDKAMKEAVSAASEDDIFRRAGGLFGNHVSYYQSDGRSAFPQTFTTQRPLHINKAGSSQGDTESPSHEKLVDSTFTPSSYSSTGSNANINNANNTALGRLPRPAGYPSTVSTVEGHGPPLSPAIRVQEVAWKLSSNRMHCCDMLDGGTFPPALGPRRAPPCLHQQLQGSLAGLREDTPCIVPGHASLCCSSRVGEWLPAGCTAPQHARCHSRESQAAMAGQEETSQDETYEVKMNHDTEACSEPSLLSTEMLSYQDDENRQLTLPEEDKRDIRQSPKRGFLRSASLGRRASFHLECLKRQKDRGGDISQKTVLPLHLVHHQALAVAGLSPLLQRSHSPASFPRPFATPPATPGSRGWPPQPVPTLRLEGVESSEKLNSSFPSIHCGSWAETTPGGGGSSAARRVRPVSLMVPSQAGAPGRQFHGSASSLVEAVLISEGLGQFAQDPKFIEVTTQELADACDMTIEEMESAADNILSGGAPQSPNGALLPFVNCRDAGQDRAGGEEDAGCVRARGRPSEEELQDSRVYVSSL

SEQ ID NO: 48 - DNA, 13694 bp, Homo sapiens
  ref <308>: DATABASE ACCESSION NUMBER: NCBI / NM_199460.3
  ref <309>: DATABASE ENTRY DATE: 2014-05-11
  ref <313>: RELEVANT RESIDUES IN SEQ ID NO: (1)..(13694)
gtgctcagttcttggaaggggcccggatgtactgaggatgcgttacagtttcactcgaggaggcagtagtggaaaggagcagtttttggggtttgatgccataatgggaatcaggtaatcgtcggcggggaagaagaaacgctgcagaccacggcttcctcgaatcttgcgcgaaagccgccggcctcggaggagggattaatccagacccgccggggggtgttttcacatttcttcctcttcgtggctgctcctcctattaaaaccatttttggtccatggtcaatgagaatacgaggatgtacattccagaggaaaaccaccaaggttccaactatgggagcccacgccccgcccatgccaacatgaatgccaatgcggcagcggggctggcccctgagcacatccccaccccgggggctgccctgtcgtggcaggcggccatcgacgcagcccggcaggctaagctgatgggcagcgctggcaatgcgaccatctccacagtcagctccacgcagcggaagcggcagcaatatgggaaacccaagaagcagggcagcaccacggccacacgcccgccccgagccctgctctgcctgaccctgaagaaccccatccggagggcctgcatcagcattgtcgaatggaaaccatttgaaataattattttactgactatttttgccaattgtgtggccttagcgatctatattccctttccagaagatgattccaacgccaccaattccaacctggaacgagtggaatatctctttctcataatttttacggtggaagcgtttttaaaagtaatcgcctatggactcctctttcaccccaatgcctacctccgcaacggctggaacctactagattttataattgtggttgtggggctttttagtgcaattttagaacaagcaaccaaagcagatggggcaaacgctctcggagggaaaggggccggatttgatgtgaaggcgctgagggccttccgcgtgctgcgccccctgcggctggtgtccggagtcccaagtctccaggtggtcctgaattccatcatcaaggccatggtccccctgctgcacatcgccctgcttgtgctgtttgtcatcatcatctacgccatcatcggcttggagctcttcatggggaagatgcacaagacctgctacaaccaggagggcatagcagatgttccagcagaagatgacccttccccttgtgcgctggaaacgggccacgggcggcagtgccagaacggcacggtgtgcaagcccggctgggatggtcccaagcacggcatcaccaactttgacaactttgccttcgccatgctcacggtgttccagtgcatcaccatggagggctggacggacgtgctgtactgggtcaatgatgccgtaggaagggactggccctggatctattttgttacactaatcatcatagggtcattttttgtacttaacttggttctcggtgtgcttagcggagagttttccaaagagagggagaaggccaaggcccggggagatttccagaagctgcgggagaagcagcagctagaagaggatctcaaaggctacctggattggatcactcaggccgaagacatcgatcctgagaatgaggacgaaggcatggatgaggagaagccccgaaacatgagcatgcccaccagtgagaccgagtccgtcaacaccgaaaacgtggctggaggtgacatcgagggagaaaactgcggggccaggctggcccaccggatctccaagtcaaagttcagccgctactggcgccggtggaatcggttctgcagaaggaagtgccgcgccgcagtcaagtctaatgtcttctactggctggtgattttcctggtgttcctcaacacgctcaccattgcctctgagcactacaaccagcccaactggctcacagaagtccaagacacggcaaacaaggccctgctggccctgttcacggcagagatgctcctgaagatgtacagcctgggcctgcaggcctacttcgtgtccctcttcaaccgctttgactgcttcgtcgtgtgtggcggcatcctggagaccatcctggtggagaccaagatcatgtccccactgggcatctccgtgctcagatgcgtccggctgctgaggattttcaagatcacgaggtactggaactccttgagcaacctggtggcatccttgctgaactctgtgcgctccatcgcctccctgctccttctcctcttcctcttcatcatcatcttctccctcctggggatgcagctctttggaggaaagttcaactttgatgagatgcagacccggaggagcacattcgataacttcccccagtccctcctcactgtgtttcagatcctgaccggggaggactggaattcggtgatgtatgatgggatcatggcttatggcggcccctcttttccagggatgttagtctgtatttacttcatcatcctcttcatctgtggaaactatatcctactgaatgtgttcttggccattgctgtggacaacctggctgatgctgagagcctcacatctgcccaaaaggaggaggaagaggagaaggagagaaagaagctggccaggactgccagcccagagaagaaacaagagttggtggagaagccggcagtgggggaatccaaggaggagaagattgagctgaaatccatcacggctgacggagagtctccacccgccaccaagatcaacatggatgacctccagcccaatgaaaatgaggataagagcccctaccccaacccagaaactacaggagaagaggatgaggaggagccagagatgcctgtcggccctcgcccacgaccactctctgagcttcaccttaaggaaaaggcagtgcccatgccagaagccagcgcgtttttcatcttcagctctaacaacaggtttcgcctccagtgccaccgcattgtcaatgacacgatcttcaccaacctgatcctcttcttcattctgctcagcagcatttccctggctgctgaggacccggtccagcacacctccttcaggaaccatattctgttttattttgatattgtttttaccaccattttcaccattgaaattgctctgaagatcctaggcaatgcagactatgtcttcactagtatctttacattagaaattatccttaagatgactgcttatggggctttcttgcacaagggttctttctgccggaactacttcaacatcctggacctgctggtggtcagcgtgtccctcatctcctttggcatccagtccagtgcaatcaatgtcgtgaagatcttgcgagtcctgcgagtactcaggcccctgagggccatcaacagggccaaggggctaaagcatgtggttcagtgtgtgtttgtcgccatccggaccatcgggaacatcgtgattgtcaccaccctgctgcagttcatgtttgcctgcatcggggtccagctcttcaagggaaagctgtacacctgttcagacagttccaagcagacagaggcggaatgcaagggcaactacatcacgtacaaagacggggaggttgaccaccccatcatccaaccccgcagctgggagaacagcaagtttgactttgacaatgttctggcagccatgatggccctcttcaccgtctccaccttcgaagggtggccagagctgctgtaccgctccatcgactcccacacggaagacaagggccccatctacaactaccgtgtggagatctccatcttcttcatcatctacatcatcatcatcgccttcttcatgatgaacatcttcgtgggcttcgtcatcgtcacctttcaggagcagggggagcaggagtacaagaactgtgagctggacaagaaccagcgacagtgcgtggaatacgccctcaaggcccggcccctgcggaggtacatccccaagaaccagcaccagtacaaagtgtggtacgtggtcaactccacctacttcgagtacctgatgttcgtcctcatcctgctcaacaccatctgcctggccatgcagcactacggccagagctgcctgttcaaaatcgccatgaacatcctcaacatgctcttcactggcctcttcaccgtggagatgatcctgaagctcattgccttcaaacccaagggttactttagtgatccctggaatgtttttgacttcctcatcgtaattggcagcataattgacgtcattctcagtgagactaatcactatttctgtgatgcatggaatacatttgacgccttgattgttgtgggtagcattgttgatatagcaatcaccgaggtaaacccagctgaacatacccaatgctctccctctatgaacgcagaggaaaactcccgcatctccatcaccttcttccgcctgttccgggtcatgcgtctggtgaagctgctgagccgtggggagggcatccggacgctgctgtggaccttcatcaagtccttccaggccctgccctatgtggccctcctgatcgtgatgctgttcttcatctacgcggtgatcgggatgcaggtgtttgggaaaattgccctgaatgataccacagagatcaaccggaacaacaactttcagaccttcccccaggccgtgctgctcctcttcaggtgtgccaccggggaggcctggcaggacatcatgctggcctgcatgccaggcaagaagtgtgccccagagtccgagcccagcaacagcacggagggtgaaacaccctgtggtagcagctttgctgtcttctacttcatcagcttctacatgctctgtgccttcctgatcatcaacctctttgtagctgtcatcatggacaactttgactacctgacaagggactggtccatccttggtccccaccacctggatgagtttaaaagaatctgggcagagtatgaccctgaagccaagggtcgtatcaaacacctggatgtggtgaccctcctccggcggattcagccgccactaggttttgggaagctgtgccctcaccgcgtggcttgcaaacgcctggtctccatgaacatgcctctgaacagcgacgggacagtcatgttcaatgccaccctgtttgccctggtcaggacggccctgaggatcaaaacagaagggaacctagaacaagccaatgaggagctgcgggcgatcatcaagaagatctggaagcggaccagcatgaagctgctggaccaggtggtgccccctgcaggtgatgatgaggtcaccgttggcaagttctacgccacgttcctgatccaggagtacttccggaagttcaagaagcgcaaagagcagggccttgtgggcaagccctcccagaggaacgcgctgtctctgcaggctggcttgcgcacactgcatgacatcgggcctgagatccgacgggccatctctggagatctcaccgctgaggaggagctggacaaggccatgaaggaggctgtgtccgctgcttctgaagatgacatcttcaggagggccggtggcctgttcggcaaccacgtcagctactaccaaagcgacggccggagcgccttcccccagaccttcaccactcagcgcccgctgcacatcaacaaggcgggcagcagccagggcgacactgagtcgccatcccacgagaagctggtggactccaccttcaccccgagcagctactcgtccaccggctccaacgccaacatcaacaacgccaacaacaccgccctgggtcgcctccctcgccccgccggctaccccagcacggtcagcactgtggagggccacgggccccccttgtcccctgccatccgggtgcaggaggtggcgtggaagctcagctccaacagggaaaggcacgttccgatgtgtgaggatctggagctcaggagggattcaggctcagcagggactcaggctcactgccttctgctcaggagagcaaacccctctaggtgccactcccgggagagccaggcagccatggcgggtcaggaggagacgtctcaggatgagacctatgaagtgaagatgaaccatgacacggaggcctgcagtgagcccagcctgctctccacagagatgctctcctaccaggatgacgaaaatcggcaactgacgctcccagaggaggacaagagggacatccggcaatctccgaagaggggtttcctccgctctgcctcactaggtcgaagggcctccttccacctggaatgtctgaagcgacagaaggaccgagggggagacatctctcagaagacagtcctgcccttgcatctggttcatcatcaggcattggcagtggcaggcctgagccccctcctccagagaagccattcccctgcctcattccctaggccttttgccaccccaccagccacacctggcagccgaggctggcccccacagcccgtccccaccctgcggcttgagggggtcgagtccagtgagaaactcaacagcagcttcccatccatccactgcggctcctgggctgagaccacccccggtggcgggggcagcagcgccgcccggagagtccggcccgtctccctcatggtgcccagccaggctggggccccagggaggcagttccacggcagtgccagcagcctggtggaagcggtcttgatttcagaaggactggggcagtttgctcaagatcccaagttcatcgaggtcaccacccaggagctggccgacgcctgcgacatgaccatagaggagatggagagcgcggccgacaacatcctcagcgggggcgccccacagagccccaatggcgccctcttaccctttgtgaactgcagggacgcggggcaggaccgagccgggggcgaagaggacgcgggctgtgtgcgcgcgcggggtcgaccgagtgaggaggagctccaggacagcagggtctacgtcagcagcctgtagtgggcgctgccagatgcgggcttttttttatttgtttcaatgttcctaatgggttcgtttcagaagtgcctcactgttctcgtgacctggagttaaccggaacagcgtcttcattcatttctgttgggaccagacgcggagcctgggtgcgcgagccgccctccgggaggaaggcgcccggctgcgtctgcagaggcggggagaggaggcggcgagggtcccggggcgcgaggaaggcgcctgccctctcccagctcgcaggccccgggcccggccgcgcctccgcggggagagcaccccggcttcccgcgcgccctcaccaaaaggaccctacagcaaacgggtgtctttcgactctgcttgtagaaaccatttgcacatattctgtacgagcctcgctgtctccctagagccagggccctgcggatttggagaagggagcggggcaggacttccaggaggaccccaacccggcccggagagggaggaggaggcctccaggggcgcggagctctggggatgggcgtcgggccggcagtggtgcggctcactccgtccctgcccacctgcgacgggatcccccgaccggcacgggccacgccgagctcccggccagccgccggcccgcaggcagcgcgagggaggagctgcgccgccggctccgcccaaccaggtggtgctgagcttccgctgagcgctcttttgttttgtggtttgacacttttcttgacagcatgttgcagtttcttttcggttttggttttttttaaatgttttattttgctttcccagcgggaggggaggaagaagagtgtttacaaagtcctgtagccccctcacctttctgttttcacttttgccaatgtacatcgggtttggttttcttgtattatttaaacggttgtggtttcctttttccacggaggttcaatagaagccgctgcaggagagttttaccaaccattgtgtatgcccaataatttgttatcatttccttaggtagtaacctatttttgttctggtttggttcggttatctaatggaaaggtaactggcaatgcacttgatgtggtcttgcacatgtgggtgatagagttgggttcctttttatgctgggtgtacaggtgggtttgggagagaggagcatgcgcgagagagtctccgagtgtgtgcgacgcgtgtgtgtgtggtgggttgtctgtgtgcatatgtcctgcccgtgtatatgcacccacaccatgtgcccgtgcacaccagtgactacgcagtcccccctttctggtttagctgtgggaagatctgaatctggggccgtttgaaagcaaaaacaaaccactgtctctgcttctgaaacgggaatcagtaactctttgcattttctgtcccacaagatatgcaaaaacaatgcaataatattcatttaaaaatacaattgtgagttgtgttggcattaaaactgtattttaaaaaaagacagaaatttaagggaaaaacacaagaaggcattttgcttcaatatattccgtgtaatgttttattgcattgataatgtttctgttgaagaaaccgttatacttgaattcaggtcagtttcagtatttttcaaatatttttttaaaactgaattgcaattgtgccaagcgaatataatgaattgaattaagttggttttcggattcacttcttgtatattttgctgcatgtaaagtaaatcattttgtatttggagtgtgacaagctttacctttgaactcaagtgcttttctatatgtggttgggggaaagggaacaagttttctttagtttgcacaatgagcaaaggtatcaccagtgtagtcattattctgctctccacaaacaggtttggacattactgttttgcatatcttgtgtttgcttacatttccctcaatttttccaaaatcgtttgctgggtatgtttgtaccgcctcttgctgtgagagaccaggacctattttattccagtcttcactctgtccactctgctctggtcatctgatttggtacttctccaagaacagcccttcactgtgaggtgcagggaggcgttctgatgagccctcagtcactgggccgtcatccgcatcccccatggaagaggtagctggctttcccttcccttccaccacacggaattttctctttggcttccttaggaaagtgtacactaaccgggaggataaaattaaagtcaggctgcttggagggaggggcatcctcacttccggattcttgttgctctacccaacaaggacagcaggggctcgagaaaggaactggtgaaaccctgatccatctgaaagtcaactctgcgtgctcctttctccatcccttcctcactctggagcagcctttccttcaggcttgccctaatgtttgggctgccggggagggggccaggacaagggaagaggcatccggagctcacagtgggggtgggaacagatttttgtgggggcatctctaatgctcacttatatctccctagaacatcactcttttggtgctgtgtccttcaaatgtatgtcaacagtggtggctgaaaagggactgctttggggaaaacaggacccaaccattcacccagaattgacccattaaatctcttccagtcctagtgttccctgagcccctcttggcacatatataagtaagctagaaattacaataagggacagtccattcctctatgacagcttgctggactgattcatgacaaagtggagaaatgtactcaatactccccggttaacacagtctagaaacagagtttctttatggatatccacacccaagtcatccaaactttcttgattccttttcactgccatcaaggtcctctagaaattgagtttaggtatcatcctttgaaaagttcccaagatttctaccaggaggtacacacaggcgttccctgtctagggcaggaggactatcctagcttgaccttctgatccactagaataagactggcgtatgatgcctgtcatcagaacagactggcacaagtagtgacatcaatgaaccacagcacaatcttccaagtgatgtctactctccacctaaaatggaattttccccatgaccttgtaaaacataattgtcacatcttccatacccctcctgacagcccccaagtgtcaggagaaaacagtcaggggctaagggcccaagggacttgaagaaacaacagtttaaggtctgcagtttggtcaacttaattcttgtcctccgaccagccctgcctctttcatttccagaccttggagaatttttcccagctttgattcagaaggtactagttataacccctttccttcttcttaatccaataggcctcactctcactgggaaatccactcaaaggaacaaggcaatgtctctcattctatttcccagttccaaattccaggtgcttgtctggagtgaagctacccgttactttctcccagcttttctccacccagcatgtctcctgcccatgcagctgaagacagtggggcaacctcaggagaagcagacctttccatgcccaagttcatctcctgagcaacagtgacacctagaaaatgaggactttggaagtcacccaaaagatggtggctactttatggagtcctgaagatacacagccaccactcctaaaggcaaagaaagaaaacacgaatgtaggtcagggatagagtggaaccctggtcatcggggtttttagcctcatcgtgggaaaggtggtaaaggaggatgatggcatctccatccctagaggccaagaattgaaatatcattgtcaaggattagaaacaattcagcaaagaggccacaaaaagggcctgctgactcccagaagacctctttaaaccccaggggaggcaaatacttgctgatggagtctgggccgtttccatattttaaagaagacctgcctctggggcaaatgtcagcacagagaggactgggaggagaatggaggcaagaaaagggcatattttgactccctctgtgcctcttcccagttcatggaaggatgtgttcagcttacccacccacagtgaccagtgtggtggagccgctgacatctcaaggatctatttgggaaggtgagaagagtactcattccatctgggggtgttgttccagccacatcagcctacctggtgggatgtgggggtgtctgccaccctgtcccccctctgctgatgtccctcccctcaggctgtccaggtgccacctgacacaggctgctgtgcaaagacaggcggggaagcccaaacctcactcccagggaggccctcagccgccagagtccaggttctccagaggctacgatttgaggaggttgagggggaagacaggagggaaagaaaagtcctacaactgtcaggaatggggcacctttccctgtccctaagcaaagctccctcttcccactgccctccccagccccagctccctgtcctccccaacacctagtgagaaagacggtgcgtggaagggagtcccatgggcagatgcttacacgacctctttgtgaagcctcttctgggtttaacttcattcatcaatttattcttatgtcaaagcaatgaaacttttctttctggagccagataccaatacaacaggtgaacgggtttctgccacatctctacattgacgggggatgcttgaacaacccccctcactacacagacacacaccgttaaggcacaagggctggggttgagctctagatgagggactttcctgctcctgcaagggtgagcactgtatacacagacaaggagggtgcagtagagtgactcccttggatggaagtagtaccatcagaacctactattattatgacataaattctatttacatacattgagagaatactacaatcaacactttttcctgggatgactttaagaggtttgagccacagcacctgaagtggcaaagatccatggtctttgtagggtattagagaactcttccagtcacctctgaaagcactctagatcttgcagctgagtggatgaagtgtaacaaatctgttgcacgctgagaggagtcagaattagcatttttcatgaaagttccccacgtctctactaagaatgaggaagaaaagactaagactaggtaattacacagaggcttgaaatgttacatcaccagagccaagtcctctcccttcagatcagttactggctgctacacagggacacccccaccttttcagggcatcccatgcactccacttctcaggatctaaggaatttgactttgtagggatcccagaaagggcactgtgccacttcccctggtgtgaatcagacatacattgtacattcatttctaaaattcactcatgcacctcaaaccaaggtcattatccaaaaaaaaaaaaaaaaagctctgggtggaagagtttgtaagttttaagagagggtcatttctatgtgaggaaatgcagaaatggacagaatgattcttattcactgtttgggtctggagaattcccattgtggaaatcttagagatctcaagtttattaccaagggaataaggaaaaaaaggtgagcaggcaccaggccaagcagtggctcccttgccaaggaacctgaggctgcaggtttcagggacccccttgaagaaacctctcctggccattggccaggagaaaagagaagtctctcctgtagagtcacaagagaagcaaaagagggtgggtcactgggtcctggacatagcccccaaccccaagacttcccaatatggagaaactacaccaatgtttaaaaggggaaaaggaaagaacttgtacatcaagggaagatgatttgtaaacacacagtcctgtgcagaaagatccccttcaggaggtgtctccagcatcccaaagctgtgcgcaccttctcttttcctgcctcaggccacctatgcatccagctgcagcccatacccacacctgaaatccatctcttgaatcccagccaggttatataccaccccattgccatgtcctgtcctggccagaatgcatgctgttcccccaagcctcgtgggagtgaggccatgggaaacagagatgagcatgtctggacaagtctgtgatggtagtggatgagaataacccatggcaaaacacgcacattcattaagaaatagggcgacagattccccgttggtgaagcactgaaaggtctattactctcataatattgctgttttattttaatccaccagagctaccatgcaaaactttcctcctgtgaaacgctccagataaagctcctctaatctccccttccctcatgtcctccagctcaaacccaccttcatcccccaaaccaatctgtatcatgcctgttatcagagaggcacagaaagatgggcagtgcctccgttgtcaccattccccacacccctacacacccccacaccctcccctccaggctccacgacttcacagtcttactgttgtaaatatcattgtacagtttgtaatcctcaaataatcccattgtcagaggcctcgcctgatgggccttctcaccctcgagaaaggccagggaatctagaaggggcaacccttcaaggagagcttcagggtcatctctgtgtgagacactattgtatattcctgtaagattgcatttttatctaaggaatgatgttatttaaaaaacaaacaaaaaacacaaaaaataagaattgcaaataaatttcttaacaatgtct

SEQ ID NO: 49 - protein, 2221 aa, Homo sapiens
  ref <308>: DATABASE ACCESSION NUMBER: NCBI / NP_955630.3
  ref <309>: DATABASE ENTRY DATE: 2014-05-11
  ref <313>: RELEVANT RESIDUES IN SEQ ID NO: (1)..(2221)
MVNENTRMYIPEENHQGSNYGSPRPAHANMNANAAAGLAPEHIPTPGAALSWQAAIDAARQAKLMGSAGNATISTVSSTQRKRQQYGKPKKQGSTTATRPPRALLCLTLKNPIRRACISIVEWKPFEIIILLTIFANCVALAIYIPFPEDDSNATNSNLERVEYLFLIIFTVEAFLKVIAYGLLFHPNAYLRNGWNLLDFIIVVVGLFSAILEQATKADGANALGGKGAGFDVKALRAFRVLRPLRLVSGVPSLQVVLNSIIKAMVPLLHIALLVLFVIIIYAIIGLELFMGKMHKTCYNQEGIADVPAEDDPSPCALETGHGRQCQNGTVCKPGWDGPKHGITNFDNFAFAMLTVFQCITMEGWTDVLYWVNDAVGRDWPWIYFVTLIIIGSFFVLNLVLGVLSGEFSKEREKAKARGDFQKLREKQQLEEDLKGYLDWITQAEDIDPENEDEGMDEEKPRNMSMPTSETESVNTENVAGGDIEGENCGARLAHRISKSKFSRYWRRWNRFCRRKCRAAVKSNVFYWLVIFLVFLNTLTIASEHYNQPNWLTEVQDTANKALLALFTAEMLLKMYSLGLQAYFVSLFNRFDCFVVCGGILETILVETKIMSPLGISVLRCVRLLRIFKITRYWNSLSNLVASLLNSVRSIASLLLLLFLFIIIFSLLGMQLFGGKFNFDEMQTRRSTFDNFPQSLLTVFQILTGEDWNSVMYDGIMAYGGPSFPGMLVCIYFIILFICGNYILLNVFLAIAVDNLADAESLTSAQKEEEEEKERKKLARTASPEKKQELVEKPAVGESKEEKIELKSITADGESPPATKINMDDLQPNENEDKSPYPNPETTGEEDEEEPEMPVGPRPRPLSELHLKEKAVPMPEASAFFIFSSNNRFRLQCHRIVNDTIFTNLILFFILLSSISLAAEDPVQHTSFRNHILFYFDIVFTTIFTIEIALKILGNADYVFTSIFTLEIILKMTAYGAFLHKGSFCRNYFNILDLLVVSVSLISFGIQSSAINVVKILRVLRVLRPLRAINRAKGLKHVVQCVFVAIRTIGNIVIVTTLLQFMFACIGVQLFKGKLYTCSDSSKQTEAECKGNYITYKDGEVDHPIIQPRSWENSKFDFDNVLAAMMALFTVSTFEGWPELLYRSIDSHTEDKGPIYNYRVEISIFFIIYIIIIAFFMMNIFVGFVIVTFQEQGEQEYKNCELDKNQRQCVEYALKARPLRRYIPKNQHQYKVWYVVNSTYFEYLMFVLILLNTICLAMQHYGQSCLFKIAMNILNMLFTGLFTVEMILKLIAFKPKGYFSDPWNVFDFLIVIGSIIDVILSETNHYFCDAWNTFDALIVVGSIVDIAITEVNPAEHTQCSPSMNAEENSRISITFFRLFRVMRLVKLLSRGEGIRTLLWTFIKSFQALPYVALLIVMLFFIYAVIGMQVFGKIALNDTTEINRNNNFQTFPQAVLLLFRCATGEAWQDIMLACMPGKKCAPESEPSNSTEGETPCGSSFAVFYFISFYMLCAFLIINLFVAVIMDNFDYLTRDWSILGPHHLDEFKRIWAEYDPEAKGRIKHLDVVTLLRRIQPPLGFGKLCPHRVACKRLVSMNMPLNSDGTVMFNATLFALVRTALRIKTEGNLEQANEELRAIIKKIWKRTSMKLLDQVVPPAGDDEVTVGKFYATFLIQEYFRKFKKRKEQGLVGKPSQRNALSLQAGLRTLHDIGPEIRRAISGDLTAEEELDKAMKEAVSAASEDDIFRRAGGLFGNHVSYYQSDGRSAFPQTFTTQRPLHINKAGSSQGDTESPSHEKLVDSTFTPSSYSSTGSNANINNANNTALGRLPRPAGYPSTVSTVEGHGPPLSPAIRVQEVAWKLSSNRERHVPMCEDLELRRDSGSAGTQAHCLLLRRANPSRCHSRESQAAMAGQEETSQDETYEVKMNHDTEACSEPSLLSTEMLSYQDDENRQLTLPEEDKRDIRQSPKRGFLRSASLGRRASFHLECLKRQKDRGGDISQKTVLPLHLVHHQALAVAGLSPLLQRSHSPASFPRPFATPPATPGSRGWPPQPVPTLRLEGVESSEKLNSSFPSIHCGSWAETTPGGGGSSAARRVRPVSLMVPSQAGAPGRQFHGSASSLVEAVLISEGLGQFAQDPKFIEVTTQELADACDMTIEEMESAADNILSGGAPQSPNGALLPFVNCRDAGQDRAGGEEDAGCVRARGRPSEEELQDSRVYVSSL

SEQ ID NO: 50 - DNA, 22 bp, Artificial Sequence
  Synthetic primer
ccacttggctctatcaaagtct

SEQ ID NO: 51 - DNA, 20 bp, Artificial Sequence
  Synthetic primer
cctgagagacactgtgaggt

SEQ ID NO: 52 - DNA, 50 bp, Artificial Sequence
  Synthetic probe
aagttccattccatctcagcccgaargttttcagagccggagacctcaca

SEQ ID NO: 53 - DNA, 51 bp, Artificial Sequence
  Synthetic probe
actaaggcctcagattttacaagatyccccgtgaacaaccaaataatacac

SEQ ID NO: 54 - DNA, 51 bp, Artificial Sequence
  Synthetic probe
tttaaaccaacaaagatcaaaacagrcaaagaaggccattacgtcatggta

SEQ ID NO: 55 - DNA, 51 bp, Artificial Sequence
  Synthetic probe
cagaagtgggaagatcacttgaagtsaggagtttgagaccagcttggagaa

SEQ ID NO: 56 - DNA, 51 bp, Artificial Sequence
  Synthetic probe
cctaaaaaggccaacccttcccagcrtgtccccaggaggcacagctgggcc

SEQ ID NO: 57 - DNA, 51 bp, Artificial Sequence
  Synthetic probe
gcggtggctcacgcctgtaatcccascactttgggaggccgaggcgggcgg

SEQ ID NO: 58 - DNA, 51 bp, Artificial Sequence
  Synthetic probe
ggagtcatccattcaaaacacagttyttccactgcagtatccgatatgttt

SEQ ID NO: 59 - DNA, 51 bp, Artificial Sequence
  Synthetic probe
cagcatgccagcaggccattctcccsgtggaacgtggagtttagctgaggg

SEQ ID NO: 60 - DNA, 51 bp, Artificial Sequence
  Synthetic probe
tttgattctctggaaacccaagtccygttttattaaagccaattcttcagt

SEQ ID NO: 61 - DNA, 51 bp, Artificial Sequence
  Synthetic probe
gcccccacacccgggctgaccctggrcccccaacagggcccctcgcataag

SEQ ID NO: 62 - DNA, 51 bp, Artificial Sequence
  Synthetic probe
gctgggactacaggcgcccgccaccrcgcccggctaattttttgtattttt

SEQ ID NO: 63 - DNA, 51 bp, Artificial Sequence
  Synthetic probe
ccggtactcgcctggagaggccgtcycacgaaatgtggagtacgtatcagt

SEQ ID NO: 64 - DNA, 51 bp, Artificial Sequence
  Synthetic probe
gaaataatgctttccctcaaaactgrgccttacaatctaatgtgcccacct

SEQ ID NO: 65 - DNA, 51 bp, Artificial Sequence
  Synthetic probe
attggcccccactctcttctggctcrtagagcttctgccaagagatcagct

SEQ ID NO: 66 - DNA, 51 bp, Artificial Sequence
  Synthetic probe
acccagacacaatgcatacttactaytttttttttttttttttttgagaca

SEQ ID NO: 67 - DNA, 51 bp, Artificial Sequence
  Synthetic probe
atatatttcctgtcagtttgcatacsaaataatgcttcatatacaatatag

1. A method of treating a mood disorder in a subject, comprising
administering to the subject a calcium channel blocker (CCB) when no more than one copy of allele [A] is present in the cells of the sample;
wherein the method comprises the step of analyzing a sample obtained from the subject for the presence of an allele [A] of CACNA1C, wherein allele [A] comprises the sequence of polymorphic marker rs1006737 before the step of administering the CCB,
or
wherein the subject is a subject from which a sample was obtained, wherein the copy number of allele [A] of CACNA1C, comprising the sequence of polymorphic marker rs1006737, in the sample has been analyzed.

2. (canceled)

3. A method of determining a treatment regimen for a subject with a mood disorder, comprising:
a) analyzing a sample obtained from a subject with a mood disorder for the presence of allele [A] of CACNA1C, wherein allele [A] comprises the sequence of the polymorphic marker rs1006737; and
b) selecting a treatment regimen comprising administration of a calcium channel blocker (CCB), when no more than one copy of allele [A] is present in the cells of the sample.

4. The method of claim 1, wherein the subject is heterozygous for allele [A].

5. (canceled)

6. The method of claim 1, comprising administering to the subject a CCB when allele [A] is absent from the cells of the sample, and optionally, comprising selecting a treatment regimen comprising administration of a CCB, when allele [A] is absent from the sample.

7. (canceled)

8. The method of claim 1, wherein the CCB is selected from the group consisting of amlodipine, diltiazem, felodipine, isradipine, nicardipine, nifedipine, nisoldipine and verapamil.

9. (canceled)

10. The method of claim 1, wherein the mood disorder is a depressive disorder, optionally, a bipolar disorder.

11. (canceled)

12. The method of claim 10, wherein the bipolar disorder is bipolar I, bipolar II, cyclothymia, or biopolar disorder not otherwise specified.

13. The method of claim 1, wherein the sample comprises DNA from a blood cell of the subject or comprises DNA from the saliva of the subject.

14. (canceled)

15. The method of claim 1, further comprising analyzing the sample for CACNA1C expression.

16. The method of claim 1, further comprising genotyping the sample for one or more of the polymorphic markers listed in Table A.

17. The method of claim 1, further comprising administering a therapeutic compound other than a CCB.

18. The method of claim 17, wherein the therapeutic compound is a mood stabilizer.

19. The method of claim 18, wherein the mood stabilizer is lithium, an anticonvulsant, or an atypical antipsychotic.

20. The method of claim 3, wherein the treatment regimen further comprises administration of a therapeutic compound other than a CCB.

21. The method of claim 20, wherein the therapeutic compound is a mood stabilizer.

22. The method of claim 21, wherein the mood stabilizer is lithium, an anticonvulsant, or an atypical antipsychotic.

23.-26. (canceled)

27. A kit comprising a nucleic acid molecule which hybridizes to or specifically binds to a region of SEQ ID NO: 1 which is about 20 basepairs (bp) to about 1000 bp upstream or downstream of position 270344 of SEQ ID NO: 1.

28. The kit of claim 27, comprising a nucleic acid molecule of SEQ ID NO: 50 and a nucleic acid molecule of SEQ ID NO: 51.
